(19) United States
(12) Patent Application Publication
(10) Pub. No.: US 2011/0263687 A1
(43) Pub. Date: Oct. 27, 2011

(54) RNA MOLECULES AND USES THEREOF

(75) Inventors: John Stanley Mattick, St. Lucia (AU); Ryan J. Taft, St. Lucia (AU); Piero Carninci, Wako-shi (JP)

(73) Assignees: RIKEN, Wako-shi (JP); THE UNIVERSITY OF QUEENSLAND, St. Lucia (AU)

(21) Appl. No.: 12/936,836

(22) PCT Filed: Apr. 7, 2009
(86) PCT No.: PCT/AU2009/000423

§ 371 Date: Mar. 8, 2011

Related U.S. Application Data
(60) Provisional application No. 61/043,012, filed on Apr. 7, 2008.

(51) Int. Cl. A61K 31/7088; C12N 5/10; C12Q 1/68; C40B 40/06; C07H 21/02; A61P 35/00; A61P 35/02; A61P 25/28; A61P 25/16; A61P 3/10; A61P 19/02; A61P 29/00; A61P 9/10; A61P 9/00; A61P 35/04; C12N 15/85

(52) U.S. Cl. 514/44 R; 435/320.1; 435/325; 435/6.1; 506/16; 536/24.1

(57) ABSTRACT

The present invention relates to substantially single-stranded isolated RNA molecules comprising 18 to 19 contiguous nucleotides that corresponds to a non-protein-coding genomic DNA sequence located between −60 and +120 nucleotides from a transcription start site in a mammalian genome. Specifically, the isolated RNA molecules have a high GC content (>60%), are nuclear specific, and may be associated with aberrant gene regulation and/or transcription in various mammalian diseases and conditions. The isolated RNA molecules, modified RNA molecules and fragments thereof may be particularly useful for the diagnosis, prognosis and treatment of diseases such as Crohn's disease, Alzheimer's disease, Parkinson's disease, rheumatoid arthritis, myocardial infarction, diabetes, congenital developmental disorders, coronary heart disease and cancer such as breast cancer, lymphoma, leukemia, aggressive metastatic brain cancers, colorectal cancer, gastric cancer, ovarian cancer and pituitary tumors.

### FIELD OF THE INVENTION

[0001] THIS INVENTION relates to molecular biology and particularly RNA molecules. More particularly, this invention relates to non-protein-coding, small RNA molecules associated with gene regulatory activity.

### BACKGROUND OF THE INVENTION

[0002] Small regulatory RNAs, are known to be present in all kingdoms of life and involved in many, if not most, fundamental cellular processes (Chu and Rana, 2007; Mattick and Makunin, 2005). For example, the best-studied class of small RNA, microRNAs (miRNAs), are vital regulators of gene expression in eukaryotes (Pillai et al., 2007; Vasudevan et al., 2007) and their mis-regulation is associated with multiple disease states (Rooij and Olson, 2007; Zhang et al., 2007).

[0003] Promoter associated small RNAs (PASRs) were identified in a recent comprehensive microarray-based study of the mammalian transcriptome (Kapranov et al., 2007). Due to the limitations of the arrays, however, little is known about the characteristics of these RNAs. Northern blot analyses of selected sequences revealed a range of RNAs larger than 22 nucleotides.

### SUMMARY OF THE INVENTION

[0004] Despite the observations that miRNAs are prevalent in mammals, it has remained unclear whether there are as yet unidentified classes of small non-coding RNAs involved in regulating gene transcription and developmental pathways in mammalian and other genomes.

[0005] In one broad form, the invention relates to a small RNA molecule that comprises a nucleotide sequence that corresponds to a genomic DNA sequence associated with gene regulation.

[0006] In a first aspect, the invention provides a substantially single-stranded isolated RNA molecule that comprises a nucleotide sequence comprising no more than 25 contiguous nucleotides that corresponds to a non-protein-coding genomic DNA sequence associated with gene regulation.

[0007] In one preferred form, said isolated RNA molecule comprises 14-22 contiguous nucleotides.

[0008] In another preferred form, said isolated RNA molecule comprises 18 or 19 contiguous nucleotides.

[0009] Typically, although not exclusively, the isolated RNA molecule is located in, or obtainable from, a cell nucleus.

[0010] Preferably, the non-protein-coding genomic DNA sequence associated with gene regulation is located between −200 and +300 nucleotides from a transcription start site (TSS) in a genome.

[0011] In a particular form, the nucleotide sequence of the isolated RNA molecule corresponds to a genomic DNA sequence located between −60 and +120 nucleotides from a transcription start site in a genome.

[0012] Preferably, the genome is of a eukaryote.

[0013] More preferably, the genome is of a metazoan.

[0014] Even more preferably, the genome is a vertebrate or mammalian genome.

[0015] Advantageously, the genome is of a human.

[0016] In certain embodiments, the nucleotide sequence of the isolated RNA molecule is GC enriched.

[0017] This aspect of the invention also provides a modified, isolated RNA molecule, a fragment of an isolated RNA molecule and/or an RNA or DNA molecule at least partly complementary to said isolated RNA molecule.

[0018] In a second aspect, the invention provides a genetic construct which comprises or encodes one or a plurality of:
[0019] (i) an isolated RNA molecule according to the first aspect;
[0020] (ii) a fragment of the isolated RNA molecule according to the first aspect;
[0021] (iii) a modified RNA molecule according to the first aspect; and/or
[0022] (iv) an at least partly complementary RNA or DNA molecule according to the first aspect.

[0023] In one particular embodiment, the genetic construct is an expression construct comprising a DNA sequence complementary to one or a plurality of the isolated RNA molecules of the first aspect operably linked or connected to one or more regulatory nucleotide sequences.

[0024] In a third aspect, the invention provides a method of identifying the isolated RNA molecule of the first aspect, said method including the step of isolating one or more of said isolated RNA molecules from a nucleic acid sample obtained from an organism.

[0025] In a fourth aspect, the invention provides a method of identifying the isolated RNA molecule of the first aspect, said method including the step of identifying a DNA sequence in a genome of an organism which is complementary to the nucleotide sequence of said one or more of said isolated RNA molecules.

[0026] In a fifth aspect, the invention provides a computer-readable storage medium or device encoded with data corresponding to one or more of:
[0027] (i) an isolated RNA molecule according to the first aspect;
[0028] (ii) a fragment of the isolated RNA molecule according to the first aspect;
[0029] (iii) a modified RNA molecule according to the first aspect; and/or
[0030] (iv) an at least partly complementary RNA or DNA molecule according to the first aspect;

[0031] In a sixth aspect, the invention provides a method of identifying a regulatory region in a genome, said method including the step of identifying an isolated RNA molecule according to the first aspect to thereby identify said regulatory region.

[0032] In one particular embodiment, said regulatory region is a transcriptionally active location and/or region of the genome.

[0033] In another particular embodiment, said regulatory region comprises a regulatory element such as an enhancer.

[0034] In yet another particular embodiment, said regulatory region is a non-transcribed region.

[0035] In a seventh aspect, the invention provides a method of determining whether a mammal has, or is predisposed to, a disease or condition associated with one or more regulatory regions of a genome, said method including the step of determining whether said mammal comprises one or more isolated RNA molecules according to the first aspect, wherein the or each nucleotide sequence of said one or more isolated RNA molecules corresponds to a genomic DNA sequence associated with said disease or condition.

[0036] In one particular embodiment, said regulatory region is a transcriptionally active location and/or region.

[0037] Preferably, the mammal is a human.

[0038] In an eighth aspect, the invention provides a nucleic acid array comprising a plurality of isolated RNA molecules according to the first aspect, immobilized, affixed or otherwise mounted to a substrate.

[0039] In a ninth aspect, the invention provides an antibody which binds:
[0040] (i) an isolated RNA molecule according to the first aspect;
[0041] (ii) a fragment of the isolated RNA molecule according to the first aspect;
[0042] (iii) a modified RNA molecule according to the first aspect; and/or
[0043] (iv) an at least partly complementary RNA or DNA molecule according to the first aspect.

[0044] In a tenth aspect, the invention provides a kit comprising one or more isolated RNA molecules according to the first aspect, or one or more isolated nucleic acids respectively complementary thereto, and/or an antibody according to the ninth aspect, and one or more detection reagents.

[0045] In an eleventh aspect, the invention provides a method of treating a disease or condition in a mammal, said method including the step of administering to the mammal a therapeutic agent selected from the group consisting of:
[0046] (i) an isolated RNA molecule according to the first aspect;
[0047] (ii) a fragment of the isolated RNA molecule according to the first aspect;
[0048] (iii) a modified RNA molecule according to the first aspect;
[0049] (iv) an at least partly complementary RNA or DNA molecule according to the first aspect; and/or
[0050] (v) an antibody according to the ninth aspect;
   to thereby treat said disease or condition.

[0051] In one non-limiting embodiment, said disease or condition is associated with aberrant regulatory activity of one or more genes.

[0052] In another non-limiting embodiment, said disease or condition is associated with aberrant transcriptional activity of one or more genes.

[0053] Preferably, the mammal is a human.

[0054] In a twelfth aspect the invention provides a pharmaceutical composition comprising a therapeutic agent selected from the group consisting of:
[0055] (i) an isolated RNA molecule according to the first aspect;
[0056] (ii) a fragment of the isolated RNA molecule according to the first aspect;
[0057] (iii) a modified RNA molecule according to the first aspect
[0058] (iv) an at least partly complementary RNA or DNA molecule according to the first aspect; and
[0059] (v) an antibody according to the ninth aspect
   and a pharmaceutically acceptable carrier, diluent or excipient.

[0060] In one embodiment, the pharmaceutical composition is for treating a disease or condition, such as but not limited to a disease or condition associated with aberrant regulatory activity of one or more genes.

[0061] Throughout this specification, unless the context requires otherwise, the words “comprise”, “comprises” and “comprising” will be understood to imply the inclusion of a stated integer or group of integers but not the exclusion of any other integer or group of integers.

### BRIEF DESCRIPTION OF THE FIGURES

[0062] FIG. 1. List of human tiRNA sequences (SEQ ID NOs: 1-16913). The specific tiRNAs are listed 5′ to 3′ end (left to right). The sequences are listed in DNA format and thus the DNA base T (Thymine) corresponds to the RNA base U (Uracil).

[0063] FIG. 2. Representative tiRNA sequences from three metazoan species. (A) Mouse (SEQ ID NOs 16914-17013); (B) chicken (SEQ ID NOs: 17014-17113); and (C) Drosophila tiRNAs (SEQ ID NOs 17114-17213) were identified in NCBI Geo libraries GSE10364 (Tam et al., 2008), GSE10686 (Glazov et al., 2008), and GSE7448 (Ruby et al., 2007). The specific tiRNAs are listed 5′ to 3′ end (left to right). The sequences are listed in DNA format and thus the DNA base T (Thymine) corresponds to the RNA base U (Uracil).

[0064] FIG. 3. Example tiRNA loci. In A and B regions of RNA PolII and Sp1 bindings and a CpGs are depicted as dark bars as annotated. (A) A UCSC screen shot displaying a cluster of tiRNAs and active promoters at the 5′ end of CITED4, which, congruent with the THP-1 monocytic leukemia model, is known to be involved in oligodendroglia) cancers (Tews et al., 2007). (B) Chicken tiRNAs mapped to the human genome, and human tiRNAs are conserved at EIF4G2. (C) Drosophila tiRNAs at the TSS of Adh.

[0065] FIG. 4. Distribution and size characteristics of tiRNAs. (a, b, c) Genome-wide distribution of small RNA 5′ ends with respect to TSSs. Black lines indicate the transcription start site, and black arrows depict the direction of transcription. Colored bars represent windows of 10 nt, and those above the x axis depict small RNAs with the same strand orientation as TSSs. Bars below the x axis (negative values) indicate small RNAs antisense to TSSs. The abbreviation ‘k’ indicates thousands. (a) THP-1 small RNA density with respect to all deepCAGE-defined TSSs (blue) or Refgene TSSs (red). Human tiRNAs are found at 1,665 human Refgene TSSs. A detailed depiction of the relationship between sense-strand deepCAGE tags and small RNAs downstream of the TSS is shown in FIG. 8. The abundance of deepCAGE tags antisense to the TSS is shown as a black line below the x axis, and correlates well with the density of small RNAs antisense and upstream of the TSS. Eighteen percent of all TSSs that have sense-strand tiRNAs also have antisense tiRNAs upstream. (b) Chicken small RNA density with respect to Refgene-annotated TSSs from libraries made from embryos collected at day 5 (brown), 7 (orange) and 9 (yellow), which intersected with 320, 507 and 231 Refgene TSS, respectively. Forty-seven percent of Refgene TSSs with sense-strand tiRNAs have antisense tiRNAs upstream. (c) Drosophila small RNAs from Chung et al. (depicted) and Ruby et al. (FIG. 5) are dominantly downstream of the TSS. TiRNAs are present at 9,423 and 2,876 Refgene TSS, respectively. Twenty-nine percent of Drosophila Refgene TSSs with sense-strand tiRNAs also have antisense tiRNAs upstream. (d, e, f) Size distribution of small RNAs that map to the same strand and −60 to +120 relative to the TSS, or on the opposite strand within 400 nt upstream of the TSS. The range of small RNA sizes varies between species owing to different sequencing technology constraints and library preparation techniques. In human (d), chicken (e) and Drosophila (f and FIG. 5), sense and antisense tiRNAs show the same overall size distributions and are dominantly and independently 18 nt. Antisense tiRNAs represent approximately one-third of the small RNAs depicted in each graph. Drosophila shows a minor peak of 21-nt RNAs, which are almost exclusively antisense and upstream of the TSS and may be endogenous siRNAs.

[0066] FIG. 5. Drosophila tiRNAs size and position characteristics. Small RNAs were obtained from Ruby et al. (a) The black line indicates the transcription start site, and the black arrow depicts the direction of transcription. Gray bars represent windows of 10 nt, and those above the x axis depict small RNAs with the same strand orientation as the TSS. Bars below the x axis (negative values) indicate small RNAs antisense to the TSS. Small RNAs are dominantly upstream and in the same orientation as the TSS. (b) Small RNAs that map to the same strand and are found in the region −60 to +120 relative to the TSS, or on the opposite strand within 400 nt upstream of the TSS, are dominantly 18 nt.

[0067] FIG. 6. Expression of genes with and without tiRNAs. (a) The relationship between gene expression and the occurrence of tiRNAs in human was investigated by comparing the relative expression of all Refgenes with tiRNAs at any time point (1,318 tiRNAs, 947 genes) with Refgenes that do not have tiRNAs at any time point (3,368 genes). Human Refgenes with tiRNAs (gray) at any time point are more highly expressed at each time point than Refgenes without tiRNAs throughout the PMA time series (white). (b) The relationship between tiRNA and gene expression in Drosophila was queried across three emybronic time points. Gene expression data was obtained from Arbeitman et al., and small RNAs from Chung et al. (2008). We found 801, 593, and 647 genes with 2,440, 1,302 and 2,011 tiRNAs in 0-1 h, 2-6 h and 6-10 h embryos, respectively. Drosophila genes with tiRNAs (gray) are more highly expressed than those without tiRNAs (white). *P<0.01, **P<0.001, ***P<0.0001.

[0068] FIG. 7. ChIP-chip enrichment of promoters with tiRNAs. The proportion of deepCAGE-defined promoters without tiRNAs (black), deepCAGE promoters with tiRNAs that are not found at canonical protein coding genes (white), and deepCAGE promoters at Refgene TSSs with tiRNAs (gray) associated with regions of the genome showing H3K9 aceylation or PU.1, RNA Pol II, or Sp1 binding is shown. The total number of deepCAGE promoters in each class is indicated above each bar.

[0069] FIG. 8. The genome-wide distribution of THP-1 small RNA 5′ends (black bars) and deepCAGE abundance (gray line) relative to transcription start sites (black bar and arrow, indicating the direction of transcription) shows an ˜20 nt offset between peak densities, indicating that tiRNAs are not truncated 5′ capped transcripts.

[0070] FIG. 9. Distribution of THP-1 small RNAs at 1 nt resolution with respect the most highly expressed deepCAGE tag from active promoters identified as either broad with peak (PB) or single peak (SP). The black bar and arrow indicate transcription start and the direction of transcription, respectively.

[0071] FIG. 10. Size distribution of unannotated THP-1 small RNAs in the most 3′ decile of annotated Refgenes. 3′ end associated small RNAs and tiRNAs are significantly different sizes (P<10⁻⁴; one tailed T-test).

[0072] FIG. 11. Size distribution of small RNA tags from CE5, CE7, and CE9.

[0073] FIG. 12. Size distribution of chicken small RNAs from the most 3′ decile of Refgenes. 3′ end small RNAs and tiRNAs are significantly different in size (P<10⁻⁴; one tailed T-test).

[0074] FIG. 13. Density distribution of THP-1 small RNAs 5′ ends at 0 h time at (A) 10 nt and (B) 1 nt density resolution. The black bar and arrow indicate transcription start and the direction of transcription, respectively. (C) 0 h tiRNA size distribution.

[0075] FIG. 14. Illumina expression analysis of Refgenes at time point 0 h with active promoters in comparison to those with active promoters and tiRNAs.

[0076] FIG. 15. Enrichment of all 0 h time point deepCAGE tag defined promoters, those with tiRNAs, and those at Refgene TSSs with tiRNAs for H3K9-aceylation or PU.1, RNA Polymerase II, and Sp1 binding.

[0077] FIG. 16. tiRNAs (vertical dashes) are associated with ETS1, the only gene known to be significantly associated with monocytic leukemia progression, consistent with the THP-1 cell model.

[0078] FIG. 17. Size and abundance of small RNAs that map −60-120 to a Refgene TSS. Nuclear small RNAs (black) show characteristics typical of tiRNAs. Cytosolic small RNAs (grey) are very weakly expressed proximal to Refgene TSSs and are dominantly 21 nt.

[0079] FIG. 18. tiRNA chromatin mark enrichments.

[0080] FIG. 19. Unannotated 18 nt small RNAs are enriched at specific chromatin marks. All unannotated small RNAs (black), which are dominantly 18 nt, and the subset of unannotated small RNAs (also dominantly 18 nt) that do not map within a UCSC KnownGene annotation (grey) are over-represented at active chromatin markers (left half of the graph) and under-represented at “silencing” chromatin markers (right third of the graph).

### DETAILED DESCRIPTION OF THE PREFERRED EMBODIMENT

[0081] To investigate transcription start site-associated small RNAs in detail, the present inventors analyzed the relationship between transcriptional start sites and small RNAs present in deep sequencing libraries from human cells, mouse, chicken, and Drosophila.

[0082] The present invention arises from the surprising discovery of a novel class of “transcription initiation” RNA molecules (tiRNAs) that may be associated with gene regulation. In a particular embodiment, tiRNA may comprise a nucleotide sequence corresponding to a region of a genome located at or near a transcriptional start site (TSS), for example, within between −200 and +300 nucleotides of a TSS, or within −60 to +120 nucleotides of a TSS.

[0083] These small RNA molecules exhibit different characteristics to the small non-coding RNA molecules (miRNA) previously identified. The present invention is based on the inventors' identification of tiRNA molecules, the manipulation of these tiRNAs and the use of tiRNAs to characterize their role and function in cells. The invention also concerns methods and compositions for identifying tiRNAs, arrays comprising tiRNAs (tiRNA array) and use of tiRNAs for diagnostic, therapeutic and prognostic applications in mammals, particularly humans.

[0084] For the purposes of this invention, by “isolated” is meant present in an environment removed from a natural state or otherwise subjected to human manipulation. Isolated material may be substantially or essentially free from components that normally accompany it in its natural state, or may be manipulated so as to be in an artificial state together with components that normally accompany it in its natural state. The term “isolated” also encompasses terms such as “enriched”, “purified”, “synthetic” and/or “recombinant”.

[0085] The term “nucleic acid” as used herein designates single- or double-stranded mRNA, RNA, cRNA, RNAi and DNA inclusive of cDNA and genomic DNA. Nucleic acids may comprise naturally-occurring nucleotides or synthetic, modified or derivatized bases (e.g. inosine, methyinosine, pseudouridine, methylcytosine etc). Nucleic acids may also comprise chemical moieties coupled thereto to them. Examples of chemical moieties include, but are not limited to, locked nucleic acids (LNAs), peptide nucleic acids (PNAs), cholesterol, 2′O-methyl, Morpholino, and fluorophores such as HEX, FAM, Fluorescein and FITC.

[0086] According to a first aspect, the invention provides a substantially-single stranded, isolated RNA molecule (referred to herein as a “transcription initiation RNA” or “tiRNA”) comprising no more than 25 contiguous nucleotides that corresponds to a non-protein-coding genomic DNA sequence associated with gene regulation.

[0087] Preferably, the tiRNA molecule comprises 14-22 contiguous nucleotides.

[0088] Typically, the tiRNA molecule comprises 18 or 19 contiguous nucleotides.

[0089] Preferably, said non-protein-coding genomic DNA sequence is located between −200 and +300 nucleotides from a transcription start site in a genome.

[0090] More preferably, the nucleotide sequence of the tiRNA molecule corresponds to a genomic DNA sequence located between −60 and +120 nucleotides from a transcription start site in a genome.

[0091] Typically, the 5′ end of a tiRNA molecule corresponds to a genomic DNA sequence located between −50 and +70 nucleotides from a transcription start site in a genome.

[0092] In this context, “corresponding to” and “corresponds to” means that the tiRNA molecule has a nucleotide sequence of, or a sequence complementary to, a genomic DNA nucleotide sequence. It will be appreciated that this definition should take into account that RNA uses a U instead of a T, as found in DNA.

[0093] Typically, the tiRNA does not encode a peptide or a protein encoded by a genome. Accordingly, the tiRNA comprises a nucleotide sequence that is referred to herein as “non-coding”.

[0094] While in one embodiment said tiRNA molecule has a nucleotide sequence transcribed from the corresponding DNA sequence, it will be appreciated that said tiRNA molecule may be chemically-synthesized de novo, rather than transcribed from a DNA sequence.

[0095] Chemical synthesis of RNA is well known in the art. Non-limiting examples include RNA synthesis using TOM amidite chemistry, 2-cyanoethoxymethyl (CEM), a 2′-hydroxyl protecting groups and fast oligonucleotide deprotecting groups.

[0096] As hereinbefore described, the nucleotide sequence of a tiRNA molecule is typically GC rich. By this is meant, that the percent GC content of the nucleotide sequence is substantially greater than the average GC content of the genome from which the tiRNA is derived. This GC contect also differs from that of miRNAs.

[0097] On average, the GC content of tiRNAs is greater than 50%, greater than about 55%, greater than about 60%, greater than about 65%, or greater than about 70% compared to about 50% for miRNAs.

[0098] It will be appreciated that this comparison is organism dependent hence the actual GC content will vary for tiRNAs of each different organism.

[0099] For example, in humans the average GC content of tiRNAs is about 72% whereas the average GC content of tiRNAs in chicken is about 65%.

[0100] It will also be appreciated that tiRNAs typically, although not necessarily, comprise a nucleotide sequence that is located within at least one CpG island.

[0101] It will further be appreciated that tiRNAs typically, although not necessarily, comprise a nucleotide sequence that comprises at least one CpG dinucleotide.

[0102] As evident from the foregoing, a tiRNA may be transcribable from a regulatory region of a genome.

[0103] In one embodiment, said regulatory region is associated with the transcription of a gene or locus encoding a protein, a regulatory RNA or other transcriptionally primed region.

[0104] In one particular embodiment, said regulatory region is a transcriptionally active region.

[0105] In many cases, but not exclusively, a tiRNA transcribable from a regulatory region of a genome may be associated with an RNA polymerase II promoter and/or an Sp1 transcription factor binding site.

[0106] It will further be appreciated that a tiRNA and the regulatory region (e.g. a TSS) with which it is associated, typically, although not necessarily, maps to a Refgene promoter or promoter region.

[0107] It will also be appreciated that Refgene promoters or promoter regions associated with tiRNAs typically, although not necessarily, exhibit no Gene Ontology term enrichment.

[0108] In some particular embodiments, the tiRNAs may be located at a TSS associated with a non-protein-coding gene or a weakly expressed non-canonical gene.

[0109] It will also be appreciated that the tiRNAs may, in some embodiments, be located at a TSS of a regulatory element that regulates the transcription of a gene at a distal location.

[0110] Typically, the regulatory element is an enhancer although without limitation thereto.

[0111] Accordingly, interference of a tiRNA at a regulatory element, such as an enhancer, may influence the transcription and/or expression of a gene that is located distally (e.g. up to thousands of bases away) to said tiRNA.

[0112] In certain embodiments, a tiRNA may be located at a region of a genome with (i) PolII binding and/or (ii) a high density of chromatin marks.

[0113] In one particular embodiment, the isolated tiRNA molecule of the invention is associated with one or more chromatin marks.

[0114] By “chromatin mark” is meant a specific signature that is indicative of a genomic region with increased gene regulatory activity.

[0115] Typically, although not exclusively, genes associated with a high density of the isolated tiRNA molecules show enrichment for chromatin marks such as H2AK5ac, H2AK9ac, H2AZ, H2BK120ac, H2BK12ac, H2BK20ac, H2BK5ac, H3K18ac, H3K23ac, H3K27ac, H3K36ac, H3K36me1, H3K4ac, H3K4me3, H3K79me2, H3K79me3, H3K9ac, H4K12ac, H4K16ac, H4K20me1, H4K5ac, H4K8ac, H4K91ac.

[0116] In some cases, genes associated with a high density of tiRNA molecules may also be associated with PolII binding and H2AZ histones.

[0117] It will therefore be appreciated that the isolated tiRNA molecules may be directly involved in the regulation of chromatin modification, activation and/or repression of gene expression.

[0118] For example, some nuclear-specific isolated tiRNA molecules may be enriched at genomic regions comprising “activating” chromatin marks such as H3K9ac, H3K4me3, and H3K120ac and may be under-represented or absent at regions with “silencing” chromatin marks.

[0119] Typically, an isolated tiRNA molecule that is over-represented at an active chromatin mark is involved in gene regulation by facilitating changes to chromatin structure.

[0120] Typically, although not exclusively, tiRNA molecules do not form secondary structures, such as stem and loop structures. Accordingly, tiRNA molecules are substantially free of internal base-pairing. In this context, by “substantially free” is meant fewer than 3, 2 or 1 internal base pairs.

[0121] Therefore, in one particularly preferred embodiment, the invention provides a substantially single-stranded isolated tiRNA molecule, wherein said isolated tiRNA molecule comprises a nucleotide sequence that:
[0122] (i) consists of 18 or 19 contiguous nucleotides that corresponds to a non-protein-coding genomic DNA sequence located between −60 and +120 nucleotides from a transcription start site (TSS) in a mammalian genome;
[0123] (ii) comprises a 5′ end that corresponds to a genomic DNA sequence located between −50 and +70 nucleotides from a TSS in a mammalian genome;
[0124] (iii) comprises a GC content greater than 60%;
[0125] (iv) is located within at least one CpG island
[0126] (v) comprises at least one CpG dinucleotide;
[0127] (vi) is transcribable from a regulatory region of a genome located at or near a TSS associated with an RNA polymerase II promoter and/or an Sp1 transcription factor binding site; and
[0128] (vii) is substantially free of internal base-pairing.

[0129] Preferably, the genome is a human genome.

[0130] Non-limiting examples of the isolated tiRNA molecules of the invention are set forth in SEQ ID NOS: 1-16913 (FIG. 1 (human)) and SEQ ID NOS: 16914-17213 (FIG. 2 A-C: chicken, mouse and Drosophila)).

[0131] Typically, although not exclusively, the isolated tiRNA molecule is located in, or obtainable from, a cell nucleus.

[0132] It will also be appreciated that the invention contemplates nucleic acid molecules (e.g. RNA or DNA) complementary to or at least partly complementary to the tiRNA molecules of the invention. Complementary or at least partly complementary nucleic acid molecules may be in DNA or RNA form.

[0133] By “at least partly complementary” is meant having at least 60%, at least 70%, at least 75%, at least 80%, at least 90%, or at least 91%, 92%, 93%, 94%, 95%, 96%, 97%, 98% or 99% sequence identity with a nucleotide sequence of a tiRNA molecule.

[0134] The invention also provides a modified tiRNA molecule.

[0135] A modified tiRNA may be altered by, complexed, labeled or otherwise covalently or non-covalently coupled to one or more other chemical entities. In some embodiments, the chemical entity may be bonded, linked or otherwise attached directly to the tiRNA, or it may be bonded, linked or otherwise attached to the tiRNA via a linking group.

[0136] Examples of such chemical entities include, but are not limited to, incorporation of modified bases (e.g inosine, methylinosine, pseudouridine and morpholino), sugars and other carbohydrates such as 2′-O-methyl and locked nucleic acids (LNA), amino groups and peptides (e.g peptide nucleic acids (PNA)), biotin, cholesterol, fluorophores (e.g FITC, Fluoroscein, Rhodamine, HEX, FAM, TET and Oregon Green) radionuclides and metals, although without limitation thereto (Fabani and Gait, 2008; You et al., 2006; Summerton and Weller, 1997). A more complete list of possible chemical modifications can be found at http://www.oligos.com/ModificationsList.htm.

[0137] In one particular embodiment, the modified tiRNA is useful as an “antisense inhibitor”. By “antisense inhibitor” is meant a nucleic acid sequence that is either complementary to or at least partly complementary to the tiRNA molecule (Dias and Stein, 2002; Kurreck, 2003; Sahu et al., 2007). The antisense inhibitor pairs with the tiRNA and interferes with tiRNA-mRNA interactions. Experiments showing sequence-specific inhibition of small RNA function have previously been demonstrated both in vitro (Meister et al., 2004; Hutvagner et al., 2004) and in vivo (Krützfeldt et al., 2005).

[0138] In another particular embodiment, the modified tiRNA is a “point mutant”. By “point mutant” is meant a tiRNA molecule where 1 or 2 nucleotides have been removed, substituted or otherwise altered. Point mutants of tiRNAs or their targets can be employed to study the function of tiRNAs in disease or to increase the affinity of tiRNAs to variant targets. Small RNA molecules involved in disease processes, including miRNAs, may have “seed-sequences”. By “seed-sequences” is meant nucleic acid sequences that comprise 2-7 nucleotides and are involved in target recognition (Lewis et al., 2003; Lewis et al., 2005). Increasing the mismatch in these sequences is predicted to significantly decrease the gene regulation function of tiRNAs. This approach may be applicable for partial inhibition of tiRNA targets.

[0139] In yet another particular embodiment, the modified tiRNA is a “tiRNA mimic”. A “tiRNA mimic” is a single-stranded RNA oligonucleotide that is complementary to or at least partly complementary to the tiRNA. The tiRNA mimic may inactivate pathological tiRNAs through complementary base-pairing. It will also be appreciated that chemical modification to LNA, PNA or morpholino and conjugation to cholesterol may stabilize the tiRNA mimic molecule and facilitate delivery of single-stranded RNA molecules to targets following intraveneous administration (Rooij and Olson, 2007).

[0140] The invention also provides a fragment of a tiRNA of the invention. By “fragment” is meant a portion, domain, region or sub-sequence of a tiRNA molecule which comprises one or more structural and/or functional characteristics of a tiRNA molecule. By way of example only, a fragment may comprise at least 5, at least 6, at least 7, at least 8, at least 9, at least 10, at least 11, at least 12, at least 13, at least 14, at least 15, at least 16 or at least 17 nucleotides of a tiRNA molecule.

[0141] It will be appreciated that the tiRNA molecules can be chemically modified to facilitate penetration into cells. Examples of such modifications include, but are not limited to, conjugation to cholesterol, Morpholino, 2′O-methyl, PNA or LNA (Partridge et al., 1996; Corey and Abrams, 2001; Kos et al., 2003).

[0142] Modified tiRNA molecules also include “variants” of the tiRNA molecules of the invention. Variants include RNA or DNA molecules comprising a nucleotide sequence at least 70%, 75%, 80%, 85%, 90%, 95%, 96%, 97%, 98% or 99% identical to a nucleotide sequence of a tiRNA molecule such as described in FIG. 1 and FIG. 2. Such variants may include one or more point mutations, nucleotide substitutions, deletions or additions.

[0143] According to another aspect, there is provided a genetic construct comprising or encoding one or a plurality of the same or different tiRNA molecules, modified tiRNA molecules, at least partly complementary DNA or RNA molecules, or fragments thereof.

[0144] It will be appreciated that said tiRNA molecules may be oriented in tandem repeats or with multiple copies of each tiRNA sequence.

[0145] As used herein, a “genetic construct” is any artificially constructed nucleic acid molecule comprising heterologous nucleotide sequences.

[0146] A genetic construct is typically in DNA form, such as a phage, plasmid, cosmid, artificial chromosome (e.g. a YAC or BAC), although without limitation thereto. The genetic construct suitably comprises one or more additional nucleotide sequences, such as for assisting propagation and/or selection of bacterial or other cells transformed or transfected with the genetic construct.

[0147] In one particular embodiment, the genetic construct is a DNA expression construct that comprises one or more regulatory sequences that facilitate transcription of one or more tiRNA molecules, modified tiRNA molecules or fragments thereof.

[0148] Such regulatory sequences may include promoters, enhancers, polyadenylation sequences, splice donor/acceptor sites, although without limitation thereto.

[0149] Suitable promoters may be selected according to the cell or organism in which the tiRNA molecule(s) is/are to be expressed. Promoters may be selected to facilitate constitutive, conditional, tissue-specific, inducible or repressible expression as is well understood in the art.

[0150] It will be appreciated that the tiRNA molecule(s) may be provided as an encoding DNA sequence in an expression construct that, when transcribed, produces the tiRNA molecule as a transcript.

[0151] It will also be appreciated that tiRNA molecules appear to be a hitherto unknown form of small, single stranded RNA molecules that occur throughout evolution. Accordingly, tiRNA molecules may be isolated, identified, purified or otherwise obtained from any organism.

[0152] Preferably, the organism is a eukaryote.

[0153] More preferably, the organism is a metazoan inclusive of all multi-celled animals ranging from jellyfish to insects and vertebrates.

[0154] Even more preferably, the organism is a vertebrate, inclusive of mammals, avians such as chickens and ducks and aquaculture species such as fish, although without limitation thereto.

[0155] Even more preferably, the organism is a mammal.

[0156] Mammals include humans, livestock such as horses, pigs, cows and sheep, domestic animals such as cats and dogs, although without limitation thereto.

[0157] In further aspects, the invention therefore provides methods of identifying, purifying or otherwise obtaining a tiRNA molecule.

[0158] Broadly, such methods may include analysis of nucleic acid samples obtained from an organism, and/or bioinformatic analysis of genome sequence information.

[0159] Preferably, the nucleic acid samples are derived from the genome of a eukaryote.

[0160] More preferably, the nucleic acid samples are derived from the genome of a metazoan inclusive of jellyfish, insects and vertebrates.

[0161] Even more preferably, the nucleic acid samples are derived from the genome of a vertebrate, inclusive of mammals, avians such as chickens and ducks and aquaculture species such as fish, although without limitation thereto. Even more preferably, the nucleic acid samples are derived from the genome of a mammal.

[0162] Mammals include humans, livestock such as horses, pigs, cows and sheep, domestic animals such as cats and dogs, although without limitation thereto.

[0163] Preferably, a method for analyzing a nucleic acid sample to identify a tiRNA includes “deep sequencing”. One particularly useful but non-limiting method for identifying transcription start sites, followed by identification of small RNA species, including tiRNAs, in a nucleic acid sample is systematic deep sequencing of CAGE (5′ cap-trapped analysis of gene expression). Examples of specific deep sequencing technologies employed for the identification of TSSs and tiRNAs include, but are not limited to, 454™-, Solexa- and SOLiD-sequencing.

[0164] In particular embodiments relating to bioinformatic analyses of genome sequence information, the invention provides a computer-readable storage medium or device encoded with structural information of one or more tiRNA molecules.

[0165] The structural information may be nucleotide sequence, sequence length, GC content and/or proximity to a TSS, although without limitation thereto.

[0166] A computer-readable storage medium may have computer readable program code components stored thereon for programming a computer (e.g. any device comprising a processor) to perform a method as described herein. Examples of such computer-readable storage media include, but are not limited to, a hard disk, a CD-ROM, an optical storage device, a magnetic storage device, a ROM (Read Only Memory), a PROM (Programmable Read Only Memory), an EPROM (Erasable Programmable Read Only Memory), an EEPROM (Electrically Erasable Programmable Read Only Memory) and a Flash memory. Further, it is expected that one having ordinary skill in the art, notwithstanding possibly significant effort and many design choices motivated by, for example, available time, current technology, and economic considerations, when guided by the concepts and principles disclosed herein will be readily capable of implementing the invention by generating necessary software instructions, programs and/or integrated circuits (ICs) with minimal experimentation.

[0167] Typically, the computer-readable storage medium or device is part of a computer or computer network capable of interrogating, searching or querying a genome sequence database.

[0168] In one example, a bioinformatic method may utilize a high performance computing station which houses a local mirror of the UCSC Genome Browser.

[0169] One further aspect of the invention provides antibodies which bind, recognize and/or have been raised against a tiRNA of the invention, inclusive of fragments and modified tiRNA molecules.

[0170] Antibodies may be monoclonal or polyclonal. Antibodies also include antibody fragments such as Fc fragments, Fab and Fab′2 fragments, diabodies and ScFv fragments. Antibodies may be made in a suitable production animal such as a mouse, rat, rabbit, sheep, chicken or goat.

[0171] The invention also contemplates recombinant methods of producing antibodies and antibody fragments. For example, antibodies to RNA molecules have been produced by a method utilizing a synthetic phage display library approach to select RNA-binding antibody fragments (Ye et al., 2008).

[0172] As is well understood in the art, antibodies may be conjugated with labels selected from a group including an enzyme, a fluorophore, a chemiluminescent molecule, biotin, radioisotope or other label.

[0173] Examples of suitable enzyme labels useful in the present invention include alkaline phosphatase, horseradish peroxidase, luciferase, β-galactosidase, glucose oxidase, lysozyme, malate dehydrogenase and the like. The enzyme label may be used alone or in combination with a second enzyme in solution or with a suitable chromogenic or chemiluminescent substrate.

[0174] Examples of chromogens include diaminobanzidine (DAB), permanent red, 3-ethylbenzthiazoline sulfonic acid (ABTS), 5-bromo-4-chloro-3-indolyl phosphate (BCIP), nitro blue tetrazolium (NBT), 3,3′,5,5′-tetramethyl benzidine (TNB) and 4-chloro-1-naphthol (4-CN), although without limitation thereto.

[0175] A non-limiting example of a chemiluminescent substrate is Luminol™, which is oxidized in the presence of horseradish peroxidase and hydrogen peroxide to form an excited state product (3-aminophthalate).

[0176] Fluorophores may be fluorescein isothiocyanate (FITC), tetramethylrhodamine isothiocyanate (TRITC), allophycocyanin (APC), Texas Red (TR), Cy5 or R-Phycoerythrin (RPE), although without limitation thereto.

[0177] Radioisotope labels may include ¹²⁵I, ¹³¹I, ⁵¹Cr and ⁹⁹Tc, although without limitation thereto.

[0178] Other antibody labels that may be useful include colloidal gold particles and digoxigenin.

[0179] In other aspects, the invention provides a method of identifying a tiRNA expression profile as a quantitative or qualitative indicator or measure of gene regulation. These methods may be particularly, although not exclusively, relevant to diagnosis of diseases and conditions associated with differential gene regulation.

[0180] In one particular embodiment, said tiRNA expression profile is an indicator and/or measure of gene transcriptional activity.

[0181] In one embodiment, the method uses a “nucleic acid array” (tiRNA array).

[0182] By “nucleic acid array” is a meant a plurality of nucleic acids, preferably ranging in size from 10, 15, 20 or 50 by to 250, 500, 700 or 900 kb, immobilized, affixed or otherwise mounted to a substrate or solid support. Typically, each of the plurality of nucleic acids has been placed at a defined location, either by spotting or direct synthesis. In array analysis, a nucleic acid-containing sample is labeled and allowed to hybridize with the plurality of nucleic acids on the array. Nucleic acids attached to arrays are referred to as “targets” whereas the labelled nucleic acids comprising the sample are called “probes”. Based on the amount of probe hybridized to each target spot, information is gained about the specific nucleic acid composition of the sample. The major advantage of gene arrays is that they can provide information on thousands of targets in a single experiment and are most often used to monitor gene expression levels and “differential expression”.

[0183] “Differential expression” indicates whether the level of a particular tiRNA in a sample is higher or lower than the level of that particular tiRNA in a normal or reference sample.

[0184] The physical area occupied by each sample on a nucleic acid array is usually 50-200 μm in diameter thus nucleic acid samples representing entire genomes, ranging from 3,000-32,000 genes, may be packaged onto one solid support. Depending on the type of array, the arrayed nucleic acids may be composed of oligonucleotides, PCR products or cDNA vectors or purified inserts. The sequences may represent entire genomes and may include both known and unknown sequences or may be collections of sequences such as miRNAs. Using array analysis, the expression profiles of normal and diseased tissues, treated and untreated cell cultures, developmental stages of an organism or tissue, and different tissues can be compared.

[0185] In one embodiment, gene profiling, such as but not limited to using a tiRNA array, is used to identify mRNAs whose expression shows a positive or inverse correlation with the expression of a specific tiRNA.

[0186] It will be appreciated that an absence of tiRNA expression could correlate with a presence of mRNA expression, or vice versa. Alternatively, a presence of tiRNA expression could correlate with a presence of mRNA expression or an absence of tiRNA expression could correlate with an absence of mRNA expression. Furthermore, a level of tiRNA expression could correlate with a level of mRNA expression, whether directly or inversely. It will be appreciated that a level of expression may be measured as a quantitative or a relative expression level.

[0187] In another embodiment, gene profiling allows the identification of regulators of disease processes and potential therapeutic targets.

[0188] Examples of diseases and conditions that show differential gene regulation include but are not limited to Crohn's disease, Alzheimer's disease, Parkinson's disease, rheumatoid arthritis, myocardial infarction, diabetes, congenital developmental disorders, coronary heart disease and cancer such as breast cancer, lymphoma, leukemia, colorectal cancer, gastric cancer, ovarian cancer, aggressive metastatic brain cancer and pituitary tumors (McKaig et al., 2003; Grünblatt et al., 2007; Liang et al., 2008; Lübke et al., 2008; Ridker, 2007; Zecchini et al., 2008).

[0189] It will be appreciated that said gene regulation may refer to aberrant gene transcription.

[0190] Further, tiRNAs may be associated with aberrant regulatory activity of oncogenes or tumor suppressors (Zhang et al., 2006) and may therefore become useful biomarkers for cancer diagnostics.

[0191] It will be appreciated that said aberrant regulatory activity may in some embodiments refer to aberrant transcriptional activity.

[0192] In one particular embodiment, the tiRNAs may be associated with oncogenes such as CITED4, p53, HoxA11, HoxA9, myc and ETS1.

[0193] In another particular embodiment, the tiRNAs may be linked to aberrant regulation and/or transcription of genes associated with leukemia such as AF10, ALOX, 12, ARHGEF12, ARNT, AXL, BAX, BCL3, BCL6, BTG1, CAV1, CBFB, CDC23, CDH17, CDX2, CEBPA, CLC, CR1, CREBBP, DEK, DLEU1, DLEU2, EGFR, ETS1, EVI2A, EVI2B, FOXO3A, FUS, GLI2, GMPS, IRF1, KIT, LAF4, LCP1, LDB1, LMO1, LMO2, LYL1, MADH5, MLL3, MLLT2, MLLT3, MOV10L1, MTCP1, NFKB2, NOTCH!, NOTCH3, NPM1, NUP214, NUP98, PBX1, PBX2, PBX3, PBXP1, PITX2, PML, RAB7, RGS2, RUNX1, SET, SP140, TAL1, TAL2, TCL1B, TCL6, THRA, TRA and ZNFN1A1.

[0194] In yet another particular embodiment, the tiRNAs may be linked to aberrant regulation and/or transcription of genes associated with Alzheimer's disease such as APP and APOE.

[0195] It will also be appreciated that in some particular embodiments, the tiRNAs may be associated with aberrant regulation and/or transcription of genes such as BRCA1 and BRCA2 in breast cancer; HER2, ras, src, hTERT, and Bcl-2 in aggressive metastatic brain cancers; PON1 in coronary heart disease; and homeobox genes (e.g. HoxA10 and SOX2) in congenital developmental disorders.

[0196] Other methods of the invention, including but not limited to the herein mentioned tiRNA array, relate to diagnostic applications of the claimed nucleic acid molecules. For example, tiRNAs may be detected in biological samples in order to determine and classify certain cell types or tissue types or tiRNA-associated pathogenic disorders which are characterized by differential expression of tiRNA molecules or tiRNA molecule patterns. Further, the developmental stage of cells, organs and/or tissues may be classified by determining spatial and/or temporal expression patterns of tiRNA molecules.

[0197] In another aspect, the invention provides a method of treating a disease or condition in an animal, said method including the step of administering to the animal a therapeutic agent selected from the group consisting of:
[0198] (i) an isolated tiRNA molecule;
[0199] (ii) a fragment of the isolated tiRNA molecule;
[0200] (iii) a modified tiRNA molecule;
[0201] (iv) an at least partly complementary RNA or DNA molecule; and/or
[0202] (v) an antibody that binds any one of (i)-(iv);
   to thereby treat said disease or condition.

[0203] Accordingly, the aforementioned therapeutic agents may be suitable for prophylaxis and/or therapy of animals, including mammals such as humans. For example, the therapeutic agents may be used to treat diseases, conditions, developmental processes and/or disorders associated with developmental dysfunctions including, but not limited to, cancer. Certain tiRNAs may function as tumour-suppressors and thus expression or delivery of these tiRNAs or “tiRNA mimics” to tumor cells may provide therapeutic efficacy.

[0204] In one embodiment, the use of chemically modified tiRNAs to target either a specific tiRNA or to disrupt the binding of a tiRNA and its specific mRNA target in vivo may provide a potentially effective means of inactivating pathological tiRNAs.

[0205] Alternatively, tiRNAs may be administered to potentiate the effects of natural tiRNAs by promoting the expression of beneficial gene products such as tumour suppressor proteins (Rooij and Olson, 2007).

[0206] Therapeutic agents may be delivered to an animal in the form of a pharmaceutical composition comprising a pharmaceutically acceptable carrier diluent or excipient.

[0207] Accordingly, the invention provides a pharmaceutical composition comprising a therapeutic agent selected from the group consisting of:
[0208] (i) an isolated tiRNA molecule;
[0209] (ii) a fragment of the isolated tiRNA molecule;
[0210] (iii) a modified tiRNA molecule;
[0211] (iv) an at least partly complementary RNA or DNA molecule and/or
[0212] (v) an antibody that binds any one of (i)-(iv);
   and a pharmaceutically acceptable carrier, diluent or excipient.

[0213] By “pharmaceutically-acceptable carrier, diluent or excipient” is meant a solid or liquid filler, diluent or encapsulating substance that may be safely used in systemic administration. This includes carriers, diluents or excipients suitable for veterinary use.

[0214] Depending upon the particular route of administration, a variety of carriers, well known in the art may be used. These carriers may be selected from a group including sugars, starches, cellulose and its derivatives, malt, gelatine, talc, calcium sulfate, vegetable oils, synthetic oils, polyols, alginic acid, phosphate buffered solutions, emulsifiers, isotonic saline and salts such as mineral acid salts including hydrochlorides, bromides and sulfates, organic acids such as acetates, propionates and malonates and pyrogen-free water.

[0215] A useful reference describing pharmaceutically acceptable carriers, diluents and excipients is Remington's Pharmaceutical Sciences (Mack Publishing Co. N.J. USA, 1991).

[0216] Any safe route of administration may be employed for providing a patient with the composition of the invention. For example, oral, rectal, parenteral, sublingual, buccal, intravenous, intra-articular, intra-muscular, intra-dermal, subcutaneous, inhalational, intraocular, intraperitoneal, intracerebroventricular, transdermal and the like may be employed. Intra-muscular and subcutaneous injection is appropriate, for example, for administration of immunotherapeutic compositions, proteinaceous vaccines and nucleic acid vaccines. In the case of gene therapy, which contemplates the use of electroporation or liposomal transfection into tissues, the drug may be transfected into cells together with the DNA.

[0217] Dosage forms include tablets, dispersions, suspensions, injections, solutions, syrups, troches, capsules, suppositories, aerosols, transdermal patches and the like. These dosage forms may also include injecting or implanting controlled releasing devices designed specifically for this purpose or other forms of implants modified to act additionally in this fashion. Controlled release of the therapeutic agent may be achieved by coating the same, for example, with hydrophobic polymers including acrylic resins, waxes, higher aliphatic alcohols, polylactic and polyglycolic acids and certain cellulose derivatives such as hydroxypropylmethyl cellulose. In addition, the controlled release may be achieved by using other polymer matrices, liposomes and/or microspheres.

[0218] Compositions of the present invention suitable for oral or parenteral administration may be presented as discrete units such as capsules, sachets or tablets each containing a pre-determined amount of one or more therapeutic agents of the invention, as a powder or granules or as a solution or a suspension in an aqueous liquid, a non-aqueous liquid, an oil-in-water emulsion or a water-in-oil liquid emulsion. Such compositions may be prepared by any of the methods of pharmacy but all methods include the step of bringing into association one or more agents as described above with the carrier which constitutes one or more necessary ingredients. In general, the compositions are prepared by uniformly and intimately admixing the agents of the invention with liquid carriers or finely divided solid carriers or both, and then, if necessary, shaping the product into the desired presentation.

[0219] The above compositions may be administered in a manner compatible with the dosage formulation, and in such amount as is pharmaceutically-effective. The dose administered to a patient, in the context of the present invention, should be sufficient to achieve a beneficial response in a patient over an appropriate period of time. The quantity of agent(s) to be administered may depend on the subject to be treated inclusive of the age, sex, weight and general health condition thereof, factors that will depend on the judgement of the practitioner.

[0220] Methods and compositions may be used for treating diseases or conditions in any animal. Animals include and encompass fish, avians (e.g. chickens and other poultry) and mammals inclusive of humans, livestock, domestic pets and performance animals (e.g. racehorses), although without limitation thereto.

[0221] So that the invention may be readily understood and put into practical effect, reference is made to the following non-limiting examples.

### EXAMPLES

### Example 1

### Identification of Transcription Start Sites (TSSs) and Small RNAs by Systematic Deep Sequencing

[0222] Transcription start sites (TSSs) in THP-1 cells, a human-derived acute monocytic leukemia cell line (Tsuchiya et al., 1982), were identified by systematic deep sequencing of CAGE (5′ cap-trapped analysis of gene expression) tags (Shiraki et al., 2003; Suzuki, 2008) (hereafter referred to as deepCAGE). DeepCAGE was performed on undifferentiated THP-1 cells and at five time points (1, 4, 12, 24, and 96 hours) during macrophage differentiation in response to phorbol 12-myristate 13-acetate (PMA) stimulation. DeepCAGE tags were mapped to the human genome, pooled across time points, and clustered to yield ˜18,000 high confidence active promoters (Suzuki, submitted 2008). These promoters contain ˜20% (˜250,000) of all mapped deepCAGE tags. Promoters that mapped to repeat masker annotations, random chromosomes, assembly gaps, the mitochondrial genome, or annotated small RNAs were removed from the analysis. Less than 0.07% of promoters overlap any annotated small RNA loci (including miRNAs and snoRNAs), showing that the CAGE libraries are not contaminated with small RNAs. The remaining 14,818 promoters were used for all subsequent analysis. On average, promoters spanned 33 nt and were composed of 16 tags, with a mean tag abundance of 2 counts per million (cpm) sequenced tags.

### Bioinformatic Analysis of THP-1 Promoters.

[0223] All bioinformatic analysis was done on a high performance computing station which houses a local mirror of the UCSC Genome Browser (Karolchik et al., 2008). Repeat masker annotations, miRNA and snoRNA loci, and assembly gaps were obtained through the local mirror. Intersections required a minimum of 1 base of overlap, and were accomplished using a modified version of UCSC's tool, bedIntersect. Promoter architecture was assessed using a python script incorporating previously published criteria (Carninci et al., 2006). Promoters with less than 10 total tags were excluded from promoter architecture analysis. Using previously reported promoter architecture definitions we found that the promoters used in all tiRNA analyses were predominantly broad with peak (PB, 46.1%), followed by generally broad (BR, 34.4%), single peak (SP, 14.4%), and multimodal (MU, 5.1%) (Carninci et al., 2006).

### THP-1 Small RNA Deep Sequencing

### Cell Culture and RNA Extraction

[0224] THP-1 cells were cultured in RPMI, 10% FBS, Penicillin/Streptomycin, 10 mM HEPES, 1 mM Sodium Pyruvate, 50 μM 2-Mercaptoethanol, and treated with 30 ng/ml PMA (Sigma) to differentiate them into macrophage-like cells. In addition to 5 unmixed short RNA libraries from undifferentiated THP-1 cells, mixed short RNA libraries were generated from THP-1 cells over a time-course of PMA differentiation (0, 2, 4, 12, 24, 96 h).

[0225] Total RNA was extracted using the standard AGPC (Acid-Guanidinium-Phenol-Chloroform) method, and all precipitations were done with ethanol, instead of Isopropyl alcohol, in order to ensure the recovery of short oligonucleotides. CTAB selective precipitation of long RNA was performed to separate long and short RNAs. Short RNAs (<75 bp) were isolated from the CTAB precipitation supernatant by precipitation with 2 volumes of ethanol. The RNA pellet was resuspended in 7M GuCl and re-ethanol precipitated.

### Mixed Short RNA Library Construction

[0226] Short RNAs derived from each time point were tagged with a 4 nt tissue ID tag during the adaptor ligation step. RNA-DNA hybrid oligonucleotide adaptor ligation was carried out using 10 μg total short RNA, 100 μM of a 5′ adaptor, containing an EcoRI recognition site (5′ adaptor sequence: 5′-acgctcacagaattcAAA-3′, upper-case is RNA oligo, lower-case is DNA oligo) and 100 μM of a specific 3′ adaptor containing an EcoRI recognition site and a 4 nt Tissue ID tag (3′ adaptor sequence: 5′-phosphate-UXXxxgaattctcacgaggccagcgt-biotin-3′, upper-case is RNA oligo, lower-case is DNA oligo, XXxx is Tissue ID tag), with T4 RNA Ligase (TaKaRa) for 16 hrs at 15° C. The sample:adaptor mixture ratio was short RNA 1 μg:100 μM 5′adaptor 0.7 μl:100 μM 3′adaptor 0.7 μl. At the end of reaction, samples for each mixed library were pooled, treated with 20 mg/ml Proteinase K (15 mins, 37° C.) and purified by phenol/chloroform extraction and ethanol precipitated to generate purified short RNAs.

[0227] Purified short RNAs were separated from adaptor dimers ((100-200 bp) 100 bp) on an 8% denaturing PAGE gel. 100-200 bp short RNAs, running above adaptor dimers, were excised and eluted from the gel in TEN elution buffer (10 mM Tris.HCl pH7.5, 1 mM EDTA pH 7.5, 250 mM NaCl) for 16 hrs˜ at 4° C. The extracted short RNA tags were filtered through MicroSpin Empty Columns (Amersham Biosciences) in TEN buffer three times to remove polyacrylamide contaminant. The filtered sample was purified by ethanol precipitation.

[0228] cDNA synthesis was carried out from purified short RNAs using 3′RT-PCR primer (sequence: 5′-biotin-gcacgctggcctcgtgagaattc-3′) with M-MLV Reverse Transcriptase RNase H Minus, Point Mutant (Promega). RT products were calibrated to determine the ratio of products derived from individual samples in the mixed library.

[0229] The cDNA fragment derived from short RNA tags were amplified by PCR using adaptor-specific primers: Primer 1 (454shortRNA3′RT-PCRprimer): 5′-biotin-gcacgctggcctcgtgagaattc-3; Primer 2 (454shortRNA5′PCRprimer): 5′-biotin-cagccgacgctcacagaattcaaa-3′. PCR was performed from 5 μl of template RT mixture, 1× buffer, 3 μl of DMSO, 12 μl of 2.5 mM dNTPs, 1.5 μl of 100 uM Primer 1, 1.5 μl of 100 uM Primer 2, 0.5 μl of EX taq polymerase (5 units/μl, TaKaRa) in a total volume of 50 ul. After incubating at 94° C. for 1 min, 12˜14 cycles were performed for 30 sec at 94° C., 30 sec at 57° C., 1 min at 70° C.; followed by 5 mins incubation at 70° C. PCR products were pooled, purified, ethanol precipitated and resuspended in 40 μl of TE buffer. The PCR products were purified on a 12% polyacrylamide gel. The appropriate 60˜80 by fraction was cut out of the gel, eluted in 500 μl of SAGE elution buffer (2.5 mM Tris.HCl pH7.5/1.25 mM ammonium acetate/0.17 mM EDTA pH 7.5) for 16 hrs at room temperature. The extracted short RNA tags were filtered twice through with MicroSpin Empty Columns (Amersham Biosciences) by centrifugation at 3000 rpm for 2 min in SAGE buffer. The resulting extract was purified by ethanol precipitation, resuspended in 25 μl of 0.1×TE buffer and quantified with Picogreen.

[0230] PCR-amplified, gel-purified short RNA tags were re-amplified in a total volume of 100 μl containing 2 ng of short RNA tags, 6 μl of DMSO, 12 μl of 2.5 mM dNTPs, 2 μl of 100 uM Primer 1, 2 μl of 100 uM Primer 2, 0.8 μl of EX taq polymerase (5 units/μl, TaKaRa). All PCR products were used in subsequent steps. After incubating at 94° C. for 1 min, 8˜9 cycles were performed at 30 sec at 94° C., 30 sec at 57° C., 1 min at 70° C. followed by 5 mins at 70° C. The PCR products were pooled, purified, ethanol-precipitated and redissolved in 50 μl of TE buffer.

[0231] PCR products were further purified with G-50 micro-columns (GE Healthcare), ethanol precipitated and resuspended in 100 μl of TE buffer. The concentration was measured with Picogreen. PCR products were digested with EcoRI (Fermentas) in several reactions (3 μg/reaction), followed by Proteinase K treatment (20 mg/ml, 45 C, 15 minutes).

[0232] The desired 25˜40-bp DNA tags derived from short RNAs were separated from the free DNA ends derived from the ligated adaptors (cut off during restriction) by incubation with streptavidin-coated magnetic beads, which capture the biotin-labeled DNA ends. The cleaved tags were mixed with the beads (700 μl) and incubated at room temperature for 15 mins with mild agitation. Then the supernatant was collected after removal of the magnetic beads. The beads were rinsed with 50 μl of 1×BW buffer (Beads wash buffer: 1M NaCl, 0.5 mM EDTA, 5 mM Tris-HCl (pH7.5)), and pooled 25˜42-nt tags from both supernatant were extracted by phenol/chloroform followed by ethanol precipitation and resuspension in 40 μl of TE buffer, or purified through Microcon YM10 columns with buffer exchange into 0.1×TE. The short RNA tags were further purified on a 12% polyacrylamide gel. The desired 25˜42-nt fraction was cut out of the gel, crushed, and eluted in SAGE elution buffer (2.5 mM Tris.HCl pH7.5, 1.25 mM ammonium acetate, 0.17 mM EDTA pH 7.5) for 16 hrs at room temperature, followed by purification, concentration with YM10 columns, and ethanol precipitation. The DNA was finally resuspended in 6 μl of 0.1×TE buffer and quantified with Picogreen.

[0233] The short RNA tags (total yield) and 454 A, B adaptors (1/20 quantity of short RNA tags) were concatenated in a 10 μl reaction with T4 DNA ligase (NEB) for 16 hrs at 15° C. Proteinase K digestion was carried out by adding 70 μl of TE buffer and 20 mg/ml Proteinase K and digesting at 45 C for 15 minutes. Concatenated tags were purified with GFX columns (Amersham) to eliminate short concatamers (<100 bp). The eluted sample (50 ul) was transferred to Roche for 454 sequencing.

### Unmixed Short RNA Library Construction

[0234] An additional 5 unmixed short RNA libraries, each containing a specific range of short RNA lengths, were constructed from undifferentiated THP-1 (referred to as control 0 h small RNAs within the main text). Unmixed Short RNA libraries were constructed using the mixed library protocol (above).

### Short RNA Library Sequencing and Tag Extraction

[0235] Concatamerized tags derived from short RNAs were sequenced using the GS FLX 454 sequencer (Roche) (Margulies et al., 2005). We used in-house developed algorithms for linker masking and the extraction of short RNA tags. Short RNA tags were extracted with the following parameters: EcoRI ligated doublet linker (12-16 bp) masking: maximum mismatch, 2 by allowed; short RNA tag length, no limits.

### Example 2

### Mapping of Small RNAs to the Human Genome

[0236] Small RNAs were isolated from unstimulated THP-1 cells, and at 2, 4, 12, 24, and 96 hours after PMA stimulation and sequenced using the Roche FLX Genome Sequencer (see above). From over 10 million sequence reads we obtained a total of 1.9 million distinct small RNA tags. Small RNA tags were mapped to the human genome (not allowing mismatches) using an in-house software package (see below), and were pooled across time points as was done with promoters identified by deepCAGE. We obtained a total of 57,198 tags that mapped uniquely to the genome, which were furthered screened to remove tags that mapped to repeat masker annotations, random chromosomes, the mitochondrial genome, known miRNA and snoRNA loci, and unannotated sequences with high homology to tRNAs or rRNAs.

[0237] Relative expression can be assessed by the number of times a small RNA is detected among all sequences obtained. In contrast to known miRNAs, which are highly expressed (average of 200 cpm per uniquely mapped tags), the remaining 22,976 small RNAs are weakly expressed, occurring on average twice per million uniquely mapped tags.

[0238] Previous deep sequencing studies have disregarded low abundance non-miRNA tags as spurious, inconsequential, or degradation products. We reasoned, however, that small RNAs in these libraries were only cloned and sequenced if they possessed a terminal 5′ phosphate, thus selecting against degradation products, and that a non-random genomic distribution would suggest that these tags are biologically meaningful. Comparison of promoters with the small RNA dataset revealed many regions of active transcription where small RNAs are abundant (FIG. 3). Indeed, we found that small RNAs in our filtered set are greater than 190 fold enriched at active promoters.

### THP-1 Small RNA Mapping

[0239] Small RNAs were mapped using ‘lochash’, an in-house application written in C++ designed to quickly locate large numbers of short (as small as 8 nucleotides) sequence element as specified in multifasta file, against a target genome. An exhaustive search of probes against the target genome (NCBI Build 36.1 of the human genome) was performed using a comprehensive hash table of all Nmers, which facilitates quick elimination of query sequences which do not have exact matches. Small RNAs were queried against both strands of the target genome, and filtered to remove any small RNA tags that mapped more than once. Intersections with genomic features (e.g. known small RNA loci, repeats) were performed as described for promoters (above).

### Example 3

### Distribution and Size Characteristics of tiRNAs from a Human Cell Line, THP-1

[0240] To examine the distribution of THP-1 small RNAs with respect to TSSs identified by deepCAGE we plotted small RNA density with respect to the most highly expressed deepCAGE tag from each promoter. Indeed, we found that small RNAs in our filtered set are greater than 190 fold enriched at active promoters. Within a 400 nt window in 10 nt bins either side of the TSS small RNAs were found to occur mainly just downstream of the TSS, with a dominant peak at +10-+20 nt (FIG. 4A). In total, regions −60 to +120 nt from the TSS encompassed 2312 small RNAs (>10% of the entire unannotated small RNA dataset) and 2824 promoters, due to the fact that many promoters are found close to one another. We termed these small RNAs “transcription initiation RNAs” (tiRNAs).

[0241] Plotting tiRNA density at higher resolution revealed that although the 5′ end of some tiRNAs coincides with the most highly expressed deepCAGE tag in a promoter, tiRNAs are predominantly 10-30 nt downstream (FIG. 4A, FIG. 8). This suggests that tiRNAs are not merely truncated or degraded 5′ ends of highly expressed transcripts. This distribution does not correlate with the abundance of deepCAGE tags downstream of the dominant transcription start site (FIG. 8), and was conserved in the subset of promoters with robust single-peak transcription starts sites (FIG. 9), many of which are associated with TATA-boxes (Carninci et al., 2006).

[0242] Further strengthening our results, and demonstrating that tiRNAs are not related to aberrant transcription, we found that the majority (74%) of tiRNAs and the promoters they are associated with (75%) map to Refgene promoter regions, and display the same density distributions observed for the dataset as a whole (FIG. 4A). When the analysis was extended to deepCAGE tags not incorporated within active promoters (see above, an additional ˜1.2 million deepCAGE tags) a further 6192 tiRNAs were identified, yielding a total of 8505 tiRNAs, or 38% of the total unannotated small RNA dataset. These tiRNAs intersect with an additional 776 Refgene promoters.

THP-1 tiRNA Analysis

[0243] Small RNA distributions with respect to the TSS were calculated by tabulating the number of small RNA 5′ ends in each bin—e.g. the number of small RNA 5′ ends that map to bases 0 to +10 relative to the transcription start. Because some TSSs map close to one another, a small RNA can be counted in more than one bin. However, we found this occurred for less than 15% of small RNAs, and thus did not substantially affect the results.

[0244] To ensure that sequence composition biases at promoters were not affecting small RNA mapping we examined all promoter regions (−60 to +120 nts relative to the most highly expressed CAGE tag) with evidence of tiRNAs and created an index of all Nmers (14-23 nts) that are unique in the human genome. We found that unique 18 mer Nmers are not overrepresented at these regions, and are found as often as expected in a random model. We then analyzed the number of unique small RNA mappings at these regions and compared them with the expected number of mappings, based on the unique Nmer index. We found fewer small RNAs of every size class (except 14 mers, which are the most weakly represented), with respect to 18 mers, than we would expect by chance.

### Bootstrap Analysis

[0245] A perl script executing a bootstrap analysis was used to estimate the likelihood of small RNAs overlapping promoters (for THP-1 small RNAs) or a Refgene TSSs (for Gallus gallus and Drosophila small RNAs, see below). For these analyses small RNAs and promoters were collapsed down to individual loci using UCSC's featureBits tool, eliminating the possibility that multiple small RNAs and promoters mapping to the same region could artificially enhance the results. Small RNAs were randomly assigned new chromosomal locations, and the number intersecting with promoters or Refgene TSSs was tabulated. This process was repeated for 10⁵ iterations. Fold enrichment was determined by dividing the number of observed overlaps by the average number of overlaps in all iterations.

### Example 4

### Regulation and Function of tiRNAs

[0246] To assess the regulation and function of tiRNAs, we analyzed the transcriptional activity of promoters associated with tiRNAs. Using the most highly expressed deepCAGE tag per promoter as a proxy for promoter activity revealed that promoters with tiRNAs were more highly expressed than promoters without tiRNAs (average 53 cpm vs 30 cpm; P<10⁻⁸), and that Refgene promoters associated with tiRNAs are even more highly expressed (average 60 cpm; P<10⁻¹⁰). Additionally, using previously reported promoter architecture definitions (Carninci et al., 2006) we found that promoters with tiRNAs are predominantly broad and broad with peak (48% and 31%, respectively), consistent with the dataset as a whole.

[0247] THP-1 response to PMA was examined in detail using Illumina bead-based arrays (Suzuki, submitted 2008). Refgenes with evidence of tiRNAs at their promoters are highly expressed at all time points (FIG. 6). Interestingly, Refgenes with tiRNAs at their promoters exhibit no Gene Ontology term enrichment.

### THP-1 Promoters at Refgene TSSs

[0248] Refgene annotations were obtained from the local mirror of the UCSC Genome Browser. A promoter mapping within −300 to +100 nt relative to an annotated Refgene TSSs was defined as mapping with a Refgene promoter. Correspondingly, these genes were identified as “present” by deepCAGE. The most highly expressed deepCAGE tags from promoters mapping within Refgene promoter regions are tightly associated with annotated TSSs. Nearly one third map to the first nucleotide of an annotated Refgene TSS, and nearly two thirds map within 50 nt of the annotated Refgene TSS. A two-tailed T-test was used to test if deepCAGE expression levels were different between populations.

### THP-1 Refgene Expression and Gene Ontology Analysis

[0249] Refgenes associated with tiRNA promoters were identified, and refSeq mRNA accession numbers were retrieved and mapped to the Human illumina V2 probe centric “genome” in Genespring v7.3.1. RIKEN quantile normalized data generated from PMA treated THP-1 biological replicates was used to examine expression levels (Suzuki, submitted 2008). A chi-squared test was used to determine statistical significance. Gene Ontology enrichment was assessed using the web-based FatiGO+ platform (Al-Shahrour et al., 2007).

### Example 5

### Enrichment for Sp1 and RNA Polymerase II at Promoters with tiRNAs

[0250] To assess if promoters with tiRNAs showed enrichment for other genomic features indicative of active transcription we examined these loci for evidence of H3K9-acetylation or binding of RNA Polymerase II and the transcription factors Sp1 and PU.1 in THP-1 cells (Suzuki, submitted 2008). Active promoters with tiRNAs exhibit pronounced enrichment for binding of RNA Polymerase II and Sp1 but, unexpectedly, show no significant correlation with H3K9-acetylation or Pu.1 binding (FIG. 7). Although tiRNAs were on average more weakly expressed (0.75 cpm per uniquely mapped tags) than unannotated small RNAs as a whole, they show specific size and sequence composition characteristics. The vast majority are less than 22 nucleotides, and almost one quarter are 18 nt (FIG. 4D). This pattern was not due to a bias towards unique 18 mers in promoter regions, or against unique n-mers of shorter length.

[0251] To ascertain if the tiRNA size distribution is unique to small RNAs proximal to TSSs we binned all unannotated small RNAs by position within annotated Refgenes. Parsing Refgene annotations into deciles to normalize for gene size we found that the most 5′ and most 3′ deciles of Refgenes contained the greatest number of small RNAs. However, we found nearly four times as many small RNAs at the 5′ ends of Refgenes as in 3′ ends, and noted that over one third of 3′ end small RNAs can be classified as tiRNAs due to their proximity to a deepCAGE tag in the 3′ end of the Refgene, leaving only ˜700 3′ end tags that were not associated with a deepCAGE tag. The size distribution of these remaining 3′end small RNAs is significantly different from tiRNAs and does not show a dominance of 18 nt small RNAs (FIG. 10).

[0252] The tiRNAs do not exhibit characteristics common to other small structural and regulatory RNAs. Less than 0.5% of tiRNAs intersect with an Evofold prediction (Pedersen et al., 2006), and only a third overlap with a phastCons element (Siepel et al., 2005). Additionally, unlike miRNAs, which are typically ˜50% GC (Griffiths-Jones et al., 2008), tiRNAs average 72% GC. Indeed, congruent with their location at TSSs with broad promoters, 88% of tiRNAs overlap an annotated CpG island (Gardiner-Garden and Frommer, 1987; Karolchik et al., 2008), and 92% contain a CpG dinucleotide, which correlates with their association with Sp1 binding sites (Kaczynski et al., 2003).

### THP-1 Promoter ChIP-Chip Analysis

[0253] Loci showing H3K9-acetylation or Pu.1, Sp1, or Pol II binding were obtained as described previously (Suzuki, submitted 2008). ChIp-chip data were analysed such that a base must be bound to the protein or marker of interest in both replicates at time 0 or 96 h to be included. 0 h and 96 h ChIP-chip data were pooled and clustered such that any “present” base must have at least one other “present” base within 35 nt.

THP-1 tiRNA Characteristic Analysis

[0254] Evofold, phastCons, and CpG island loci were obtained from the local mirror of the UCSC Genome Browser. Intersections between tiRNAs and these genomic features were performed using a modified version of UCSC's bedIntersect. Sequence analysis was performed using python scrips and basic Unix tools. A one-tailed T-test was used to test if size distributions were different between tiRNAs and 3′ end small RNAs.

### THP-1 0 h Timepoint Analysis

[0255] To ensure that pooling the deepCAGE and small RNA deep sequencing data across time points after THP-1 stimulation with PMA was not distorting the results, we restricted our analysis to the control time point at 0 h. Using deepCAGE tags detected in at least two replicates at 0 h, we found that all trends observed for the pooled dataset are recapitulated at 0 h, although overall less robustly. We found 156 small RNAs >200 fold enriched at 240 active promoters present at 0 h, which map to regions −60 to +120 nt relative to the TSS, with the highest density of tags 10 nt or further downstream (FIG. 13 A,B). The vast majority of these tiRNAs and their associated promoters map to Refgene TSSs (79% and 83% respectively), which are highly expressed (FIG. 14) and are enriched for Sp1 and RNA PolII binding (FIG. 15). 0 h tiRNAs are dominantly 18 nt (FIG. 13C), and have no intersection with Evofold predictions. Only one third intersect with a phastCons element. Consistent with tiRNAs from the pooled dataset we found that 0 h tiRNAs were ˜72% GC.

### Example 6

### tiRNAs in Chicken (Gallus gallus)

[0256] To determine if tiRNAs are present in other vertebrate species we then analysed small RNA libraries that were prepared from chicken embryos collected at day 5, day 7 and day 9 of incubation (hereafter referred to as CE5, CE7 and CE9 respectively) (Glazov et al., 2008). These represent the chicken embryonic developmental stages 25-27, 30-31 and 35, which cover major morphological changes (Hamburger and Hamilton, 1992). Interestingly, we found that the size distribution of uniquely mapping small RNAs at each time point varies considerably (Glazov et al., Submitted 2008) with later time points exhibiting proportionally more RNAs less than 20 nt (FIG. 11). Consistent with the human datasets, we found that small RNAs (less than 22 nt) were also over-represented at Refgene TSSs in chicken. Moreover, their fold enrichment at TSSs was directly related to the proportion of small RNAs in the dataset (FIG. 11). CE5 displayed the weakest enrichment at Refgene TSSs at 16×, while both CE7 and CE9 showed ˜60× enrichment at TSSs. CE5, 7 and 9 intersected 320, 507, and 231 Refgene TSSs, respectively. As in human cells, the small RNAs from the chicken libraries are tightly clustered −60 to +120 nt of Refgene TSSs, and show a density of small RNAs downstream of +10 nt (FIG. 4B). In total we found a total of 1886 tiRNAs which are dominantly 18 nt (FIG. 4E), in contrast to variable size distributions in 3′ end associated small RNAs, which show enrichment for sizes more frequently associated with miRNAs (FIG. 11). Chicken tiRNAs from all three libraries show expression levels (on average <0.85 cpm mapped tags), conservation levels (35% overlap with a phastCons element), and GC profiles (˜65% GC, >87% intersect a CpG island) consistent with human tiRNAs. We mapped chicken tiRNAs from CE5, CE7, and CE9 to the human genome. We found that >40% of chicken tiRNAs mapped to regions −60 to +120 nt relative to the most abundant human deepCAGE tag in a promoter, and >80% of chicken tiRNAs from each library map to regions −60 to +120 to any deepCAGE tag, suggesting that tiRNAs are positionally conserved.

Gallus gallus Small RNA Analysis

[0257] Solexa deep sequenced chicken small RNA tags were obtained from Glasov et al (Glazov et al., Submitted 2008). Tags were mapped to UCSC genome build galGal3 (v2.1 draft assembly, Genome Sequencing Center, Washington University School of Medicine) using Vmatch (http://www.vmatch.de/). Tags were included in subsequent analyses only if they mapped uniquely and without mismatches. Repeat masker annotations, genome assembly gaps, and Refgene, phastCons, and CpG island coordinates were obtained directly through the UCSC Genome Browser mirror. Known small RNA loci were compiled from miRBase (v 10.0) (Griffiths-Jones et al., 2008), and sequence homology searches with known mammalian snoRNAs. Small RNAs intersecting with any repeats, known small RNAs, assembly gaps, or the mitochondrial genome were removed from all analyses. Refgene TSSs coordinates were extracted from the UCSC Genome Browser. Bootstrap enrichment was preformed as described above. Small RNA distributions with respect to the TSS were calculated by tabulating the number of small RNA 5′ ends in each bin, as described above. Due to the paucity of Refgene annotations in the Gallus gallus genome, and therefore the limited number of TSSs used in this analysis, small RNAs mapping to multiple bins was observed less than 2% of cases. A one-tailed T-test was used to test if size distributions were different between tiRNAs and 3′ end small RNAs.

### Example 7

### tiRNAs in Drosophila

[0258] To investigate if tiRNAs are present in organisms outside the vertebrate lineage we queried publicly available Drosophila deep sequencing libraries (Ruby et al., 2007; Yin and Lin, 2007). Consistent with the human and chicken results, Drosophila small RNAs are enriched (>3 fold) in regions −60 to +120 nt relative to annotated Refgene start sites (FIG. 4C), are found 10 nt or more downstream of the TSS, are GC rich (>53%), and are dominantly 18 nt (FIG. 4F). In total we identified 1972 Drosophila tiRNAs, less than 1% of which overlap an Evofold prediction. The breadth of the Drosophila libraries allowed us to investigate if tiRNAs are disproportionately represented in specific areas of the body. More than 6% of tags derived from Drosophila heads are tiRNAs—nearly twice the proportion observed for any other library (Table 1). We also investigated whether tiRNAs are associated with genes that are regulated at the postinitiation stage of transcription (Mellor et al., 2008). This would be consistent with the observation that at noninduced but poised promoters, RNA Pol II pauses soon after promoter escape in the region around +20 to +40, with a peak of binding at +50 (ref. 26), positions which correlate well with peak tiRNA incidence. We intersected Drosophila tiRNAs from the Ruby et al. and Chung et al. datasets with stalled loci from 2-4 h embryos (Zeitlinger et al., 2008). At most one-third of the tiRNAs in any tissue or developmental-time-point library associate with a maximum of one quarter of stalled loci (Table 1). TiRNAs mapping to stalled loci are most abundant (˜threefold enriched) in embryonic and cultured S2 and K2 cell libraries (which may show an undifferentiated cell-type transcriptional state), consistent with the origin of the stalled gene dataset. This indicates that tiRNA expression may be influenced by RNA Pol II stalling, but tiRNAs are not exclusively associated with stalled transcripts.

### Drosophila Small RNA Analysis

[0259] Drosophila melanogaster deep sequencing libraries were obtained through NCBI GEO. Libraries GSE7448 (Ruby et al., 2007) and GSE11624 (Chung et al. 2008) were mapped to genome using Vmatch (http://www.vmatch.de/). Acquisition of genomic features and removal of small tags that mapped to small RNAs, repeats, etc. was accomplished as described above (Gallus gallus small RNA analysis). Bootstrap enrichment was preformed as described above. Small RNA distributions with respect to the TSS were calculated by tabulating the number of small RNA 5′ ends in each bin, as described above. Small RNAs mapping to multiple bins was observed in less than 10% of cases.

### Example 8

### tiRNAs and Disease Associated Genes

[0260] We have identified tiRNAs at a suite of oncogenes, including CITED4, p53, HoxA11, HoxA9, and myc in human THP-1 cells, a monocytic leukemia cell line. Importantly, we have also identified THP-1 tiRNAs at ETS1, which is known to be associated with monocytic leukemia progression and prognosis (FIG. 16), consistent with the origin of the model cell line.

[0261] We predict that tiRNAs are involved in gene expression by interacting directly with RNA Polymerase II, transcription factors, or other DNA binding proteins, or indirectly via chromatin modification (more below), and are dis-regulated in disease states. For example, we expect that the following genes will show aberrant tiRNA expression in leukemias: AF10, ALOX, 12, ARHGEF12, ARNT, AXL, BAX, BCL3, BCL6, BTG1, CAV1, CBFB, CDC23, CDH17, CDX2, CEBPA, CLC, CR1, CREBBP, DEK, DLEU1, DLEU2, EGFR, ETS1, EVI2A, EVI2B, FOXO3A, FUS, GLI2, GMPS, IRF1, KIT, LAF4, LCP1, LDB1, LMO1, LMO2, LYL1, MADH5, MLL3, MLLT2, MLLT3, MOV10L1, MTCP1, NFKB2, NOTCH1, NOTCH3, NPM1, NUP214, NUP98, PBX1, PBX2, PBX3, PBXP1, PITX2, PML, RAB7, RGS2, RUNX1, SET, SP140, TAL1, TAL2, TCL1B, TCL6, THRA, TRA, ZNFN1A1 (Leukemia associated genes were obtained from http://www.bioinformatics.org/legend/leuk_db.htm#g3)

[0262] Likewise, we predict that genes associated with other disease states will also show altered tiRNA expression. For example tiRNA expression will be altered at APP and APOE in Alzheimer's disease; BRCA1 and BRCA2 in breast cancer; HER2, ras, src, hTERT, and Bcl-2 in aggressive metastatic brain cancers; PON1 in coronary heart disease; and homeobox genes (e.g. HoxA10 and SOX2) in congenital developmental disorders.

[0263] To systematically examine tiRNA dis-regulation in these systems we will perform high throughput next generation deep sequencing (using an appropriate small RNA sequencing device, e.g. the Illumina Solexa Genome Analyzer II) on matched disease and normal tissues. Experiments will include biological and technical replicates and synthetic RNA spike-ins to facilitate normalization across libraries. A gene's tiRNA expression will be defined as the number of deep sequencing reads that map within −60-120 nt of the transcription start site. Disease gene tiRNA expression will be assessed, and those showing aberrant tiRNA levels will be functionally characterized using synthetic tiRNA-mimics and siRNAs against the tiRNAs. We predict that inhibition of tiRNA expression will selectively decrease gene expression, and that introduction of tiRNA mimics will increase gene expression.

### Example 9

### Human tiRNAs are Nuclear Localized

[0264] High throughput next generation deep sequencing was performed to determine tiRNA subcellular localization. Cultured THP-1 cells were grown to high density, and nuclear and cytosolic RNA fractions were isolated. RNA fraction quality was assessed on the Agilent Bioanalyzer. We employed Northern blots and qRT-PCR to detect nuclear specific (snoRNA and snRNA) and cytosolic specific (tRNA) small RNAs to ensure sample purity. Synthetic small RNA spike-ins were added to each sample to facilitate cross-library comparison. THP-1 nuclear and cytosolic 15-35 nt small RNA libraries were sequenced on the Illumina Solexa Genome Analyzer II.

[0265] tiRNAs are found almost exclusively in the nuclear fraction of THP-1 cells (Table 2 and FIG. 17). Small RNAs from the nuclear fraction are highly enriched at regions −60-120 nt relative to Refgene TSSs, are dominantly 18 nt, and intersect with more than a third of human Refgene annotations. In contrast, the cytosolic fraction contains very few promoter-proximal small RNAs, and hardly any are 18 nt. This data conclusively shows that tiRNAs are nuclear phenomenon.

### Example 10

### Genes with a High Abundance of tiRNAs are Enriched for 23 Specific Chromatin Marks

[0266] Human Refgenes with THP-1 derived tiRNAs were assessed for enrichment of 38 chromatin marks, RNA Polymerase II (PolII) and CTCF binding, and H2AZ, a rare histone (Barski et al. Cell (2007) vol. 129 (4) pp. 823-37 & Wang et al. Nature Genetics (2008) vol. 40 (7) pp. 897-903). Using the nuclear small RNA deep sequencing set, genes with tiRNAs were parsed into two groups: those having a high tiRNA abundance (total tag count >8,677 genes) or low tiRNA abundance (1 tiRNA, 2929 genes). The average chromatin mark or protein binding intensity was assessed at 1 nt resolution 200 nt up and downstream of the TSS.

[0267] Genes with a high density of tiRNAs show enrichment for 23 chromatin marks (H2AK5ac, H2AK9ac, H2AZ, H2BK120ac, H2BK12ac, H2BK20ac, H2BK5ac, H3K18ac, H3K23ac, H3K27ac, H3K36ac, H3K36me1, H3K4ac, H3K4me3, H3K79me2, H3K79me3, H3K9ac, H4K12ac, H4K16ac, H4K20me1, H4K5ac, H4K8ac, H4K91ac), PolII binding and H2AZ histones. These data suggest that tiRNAs are directly involved in the regulation of chromatin modification and gene expression.

[0268] In each of the following graphs (FIG. 18) solid lines depicts the chromatin or protein binding density of genes with a high number of tiRNAs (solid red) or few tiRNAs (dashed blue). The TSS is denoted as a solid black vertical line. Gray bars at +10 and +30 indicate the region of tiRNA biogenesis.

### Example 11

### Unannotated 18 nt Nuclear Small RNAs are Enriched at Specific Chromatin Marks

[0269] The nuclear THP-1 small RNA data has a large abundance (˜80,000 sequences) of small RNAs that are dominantly 18 nt but do not map to canonical Refgene or UCSC KnownGene promoter regions. To assess if these 18 nt regions are tiRNA-like and are also enriched for specific chromatin marks we performed a bootstrap enrichment analysis, excluding canonical promoters and regions proximal to THP-1 deepCAGE clusters. To ensure that the analysis was not biased by known genomic features, THP-1 nuclear small RNA data were parsed to remove any sequences that mapped to repeats, small RNAs (e.g. tRNAs, snRNAs, snoRNAs, and miRNAs), assembly gaps, “random” chromosomes, or proximal to TSSs. We also analyzed a subset of this data, which was further parsed to remove any small RNAs that mapped within a UCSC KnownGene annotation.

[0270] Nuclear-specific 18 nt small RNAs are highly enriched at regions with “activating” chromatin marks (e.g. H3K9ac, H3K4me3, and H3K120ac) and are under enriched at regions with “silencing” chromatin marks (FIG. 19). This enrichment is independent known tiRNA associations with these chromatin markers (since TSS proximal regions were completely excluded from the analysis), and suggests that 18 nt nuclear small RNAs, of which tiRNAs are a dominant subset, are generally associated with active chromatin and are involved in gene regulation by facilitating changes to chromatin structure.

[0271] Throughout this specification, the aim has been to describe the preferred embodiments of the invention without limiting the invention to any one embodiment or specific collection of features. Various changes and modifications may be made to the embodiments described and illustrated herein without departing from the broad spirit and scope of the invention.

[0272] All computer programs, algorithms, patent and scientific literature referred to in this specification are incorporated herein by reference in their entirety.

TABLE 1
Drosophila tiRNAs

| | | | | | | |
|---|---|---|---|---|---|---|
| | | Unannotated small | tiRNA | tiRNA abundance at | Number of genes | Number of stalled genes |
| Sample ID | Description | RNA abundance | abundance (%)^{a} | stalled genes (%)^{b} | with tiRNAs (%)^{c} | with tiRNAs (%)^{d} |

GSE7448

| | | | | | | | | | | |
|---|---|---|---|---|---|---|---|---|---|---|
| GSM180328 | Adult heads | 14,555 | 1,020 | (7) | 32 | (3) | 159 | (1) | 35 | (22) |
| GSM180329 | Adult bodies | 15,961 | 573 | (4) | 33 | (6) | 223 | (1) | 24 | (11) |
| GSM180330 | Early embryo | 8,569 | 82 | (1) | 22 | (27) | 106 | (1) | 26 | (25) |
| GSM180331 | Early embryo | 11,509 | 129 | (1) | 41 | (32) | 162 | (1) | 38 | (23) |
| GSM180332 | Mid embryo | 5,329 | 86 | (2) | 28 | (33) | 116 | (1) | 25 | (22) |
| GSM180333 | Late embryo | 14,547 | 314 | (2) | 57 | (18) | 332 | (2) | 56 | (17) |
| GSM180334 | 1st 3rd instars | 9,990 | 225 | (2) | 25 | (11) | 214 | (1) | 26 | (12) |
| GSM180335 | Imaginal discs | 16,162 | 283 | (2) | 21 | (7) | 222 | (1) | 26 | (12) |
| GSM180336 | Pupae (0-4 d) | 5,673 | 122 | (2) | 15 | (12) | 116 | (1) | 17 | (15) |
| GSM180337 | S2 cells | 19,252 | 171 | (1) | 54 | (32) | 219 | (1) | 51 | (23) |

GSE11624

| | | | | | | | | | | |
|---|---|---|---|---|---|---|---|---|---|---|
| GSM240749 | Female heads | 46,966 | 3,139 | (7) | 154 | (5) | 764 | (4) | 149 | (20) |
| GSM272651 | S2 and KC cells | 70,062 | 1,757 | (3) | 574 | (33) | 1,657 | (8) | 389 | (23) |
| GSM272652 | S2 cells | 327,046 | 5,799 | (2) | 1,665 | (29) | 3,699 | (18) | 678 | (18) |
| GSM272653 | KC cells | 108,486 | 4,031 | (4) | 1,473 | (37) | 2,787 | (14) | 591 | (21) |
| GSM275691 | Imaginal disc | 99,916 | 3,235 | (3) | 339 | (10) | 2,067 | (10) | 286 | (14) |
| GSM286601 | Male heads | 23,324 | 2,099 | (9) | 94 | (4) | 464 | (2) | 94 | (20) |
| GSM286602 | Male body | 56,524 | 3,633 | (6) | 251 | (7) | 1,072 | (5) | 146 | (14) |
| GSM286603 | Female body | 90,494 | 4,513 | (5) | 368 | (8) | 1,506 | (7) | 200 | (13) |
| GSM286604 | Embryo (0-1 h) | 241,146 | 11,207 | (5) | 1,026 | (9) | 2,134 | (10) | 327 | (15) |
| GSM286613 | Embryo* (0-1 h) | 126,413 | 1,972 | (2) | 370 | (19) | 1,725 | (8) | 286 | (17) |
| GSM286605 | Embryo (2-6 h) | 213,042 | 4,273 | (2) | 838 | (20) | 2,284 | (11) | 430 | (19) |
| GSM286606 | Embryo* (2-6 h) | 47,944 | 1,050 | (2) | 209 | (20) | 510 | (2) | 97 | (19) |
| GSM286607 | Embryo (6-10 h) | 102,773 | 2,875 | (3) | 943 | (33) | 1,241 | (6) | 315 | (25) |
| GSM286611 | Embryo* (6-10 h) | 90,311 | 3,358 | (4) | 1,143 | (34) | 1,966 | (10) | 454 | (23) |

^{a}Percentage of unannotated small RNA abundance,
^{b}tiRNA abundance,
^{c}all Refgenes, or
^{d}of stalled genes.
*Biological replicate libraries.

TABLE 2
tiRNAs are nuclear enriched

| | | Cytoplasmic |
|---|---|---|
| | Nuclear small | small RNA |
| | RNA fraction | fraction |
| Number of small RNAs within | 15,012 | 927 |
| −60-120 nt of a human Refgene TSS | | |
| Dominant small RNA size | 18 nt | 21 nt |
| Total abundance of small RNAs within | 19,481 | 1143 |
| −60-120 nt of a Refgene TSS | | |
| Number of genes with small RNAs within | 7014 | 914 |
| −60-120 nt of a Refgene TSS | | |
| Total tiRNA enrichment | ~12 fold | — |

### REFERENCES

[0273] F. Al-Shahrour et al., Nucl Acids Res 35: W91 (2007).

[0274] A. Barski et al., Cell 129 (4): 823 (2007).

[0275] P. Carninci et al., Nat Genet 38: 626 (2006).

[0276] W J. Chung et al., Curr. Biol 18: 795 (2008).

[0277] D R. Corey and J M. Abrams, Genome Biol 2: 1015.1 (2001).

[0278] N. Dias and C A. Stein, Mol Cancer Ther 1: 347 (2002).

[0279] C Y. Chu and T M. Rana, J Cell Physiol 213: 412 (2007).

[0280] G. Dieci et al., Trends Genet 23: 614 (2007).

[0281] M M. Fabani and M J. Gait, RNA 14: 336 (2008).

[0282] C R. Faehnle et al., Curr Opin Chem Biol 11: 569 (2007).

[0283] M. Gardiner-Garden and M. Frommer, J Mol Biol 196: 261 (1987).

[0284] E A. Glazov et al., Genome Research, 18:957 (2008).

[0285] S. Griffiths-Jones et al., Nucleic Acids Res 36: D154 (2008).

[0286] E. Grünblatt et al., J Alzheimers Dis, 12: 291 (2007).

[0287] V. Hamburger et al., Dev Dyn 195: 231 (1992).

[0288] http://www.oligos.com/ModificationsList.htm

[0289] G. Hutvagner et al., PLoS Biology, 2: 465 (2004).

[0290] J. Kaczynski et al., Genome Biol 4: 206 (2003).

[0291] P. Kapranov et al., Science 316: 1484 (2007).

[0292] D. Karolchik et al., Nucl Acids Res 36: D773 (2008).

[0293] R. Kos et al., Dev Dyn 226: 470 (2003).

[0294] J. Krützfeldt et al., Nature, 438: 685 (2005).

[0295] J. Kurreck, Eur J Biochem, 270: 1628 (2003).

[0296] B P. Lewis et al., Cell, 115: 787 (2003).

[0297] B P. Lewis et al., Cell, 120: 15 (2005).

[0298] W S. Liang et al., Physiol Genomics (2008).

[0299] A K. Lübke et al., Arthritis Res Ther, 18: R9 (2008).

[0300] M. Margulies et al., Nature 437, 376 (2005).

[0301] J S. Mattick and I V. Makunin, Hum Mol Genet 14: R121 (2005).

[0302] B C. Mc Kaig et al., Am J Pathol 162: 1355 (2003).

[0303] G. Meister et al., RNA, 10: 544 (2004).

[0304] J. Mellor et al., Curr. Opin. Genet. Dev. 18:116(2008)

[0305] M. Partridge et al., Antisense Nucleic Acid Drug Dev 6: 169 (1996).

[0306] J S. Pedersen et al., PLoS Comput Biol 2: e33 (2006).

[0307] R S. Pillai et al., Trends Cell Biol 17: 118 (2007).

[0308] P M. Ridker, Nutr Rev, 65: S253 (2007).

[0309] E. van Rooij and E N. Olson, J Clin Invest 117: 2369 (2007).

[0310] J G. Ruby et al., Genome Res 17: 1850 (2007).

[0311] N K. Sahu et al., Curr Pharm Biotechnol 8: 291 (2007).

[0312] T. Shiraki et al., Proc Natl Acad Sci USA 100: 15776 (2003).

[0313] A. Siepel et al., Genome Res 15: 1034 (2005).

[0314] J. Summerton and D. Weller, Antisense Nucleic Acid Drug Dev 7: 187 (1997).

[0315] H. Suzuki, Submitted (2008).

[0316] O. Tam et al., Nature 453:534 (2008).

[0317] B. Tews et al., Oncogene 26: 5010 (2007).

[0318] S. Tsuchiya et al., Cancer Res 42: 1530 (1982).

[0319] S. Vasudevan et al., Science 318: 1931 (2007).

[0320] Z. Wang et al., Nature Genetics 40 (7): 897 (2008).

[0321] J D. Ye et al., Proc Natl Acad Sci USA. 105: 82 (2008).

[0322] H. Yin and H. Lin, Nature 450: 304 (2007).

[0323] Y. You et al., Nucl Acids Res 34: e60 (2006).

[0324] S. Zecchini et al., Cancer Res 68: 1110 (2008).

[0325] J. Zeitlinger et al., Nat. Genetics 39:512 (2008).

[0326] B. Zhang et al., Dev Biol 302: 1 (2007).

1-49. (canceled)

50. A substantially single-stranded isolated RNA molecule, wherein said isolated RNA molecule comprises a nucleotide sequence:
(i) consisting of no more than 25 contiguous nucleotides;
(ii) corresponding to a non-protein-coding genomic DNA sequence located between −200 and +300 nucleotides from a transcription start site (TSS) in a genome of an organism; and
(iii) having an average GC content that is greater than 60%.

51. The isolated RNA molecule of claim 50, wherein said nucleotide sequence consists of 14-22 contiguous nucleotides.

52. The isolated RNA molecule of claim 50, wherein said nucleotide sequence consists of 18 or 19 contiguous nucleotides.

53. The isolated RNA molecule of claim 50, wherein said genomic DNA sequence is located between −60 and +120 nucleotides from said TSS in said genome.

54. The isolated RNA molecule of claim 50, wherein said nucleotide sequence is located within at least one CpG island.

55. The isolated RNA molecule of claim 50, wherein said nucleotide sequence comprises at least one CpG dinucleotide.

56. The isolated RNA molecule of claim 50 having a 5′ end that corresponds to a genomic DNA sequence located between −50 and +70 nucleotides from a TSS in a genome.

57. The isolated RNA molecule of claim 50, wherein said isolated RNA molecule is located at or near a TSS and wherein said TSS is associated with an RNA polymerase II promoter and/or an Sp1 transcription factor binding site.

58. The isolated RNA molecule of claim 50, wherein said genome is of a human.

59. The isolated RNA molecule of claim 50, comprising a nucleotide sequence selected from any one of the nucleotide sequences set forth in SEQ ID NOs: 1 to 17213, or a nucleotide sequence at least partly complementary thereto.

60. A modified RNA molecule comprising the isolated RNA molecule of claim 50, or a nucleotide sequence at least 70% identical thereto.

61. A fragment of the isolated RNA molecule of claim 50, wherein said fragment comprises at least 5 nucleotides of said isolated RNA molecule.

62. A genetic construct comprising or encoding one or more of the isolated RNA molecules of claim 50.

63. A host cell containing the genetic construct of claim 62.

64. A method of identifying the isolated RNA molecule of claim 50, said method including the step of isolating one or more of said isolated RNA molecules from a nucleic acid sample.

65. The method of claim 64, wherein said nucleic acid sample is from a human.

66. A method of identifying a genomic DNA sequence, said method including the step of identifying a DNA sequence in a genome of an organism which is complementary to the nucleotide sequence of the isolated RNA molecule of claim 50.

67. A method of identifying a regulatory region of a genome, said method including the step of identifying the isolated RNA molecule of claim 50.

68. The method of claim 67, wherein said regulatory region is a transcriptionally active region.

69. The method of claim 67, wherein said genome is of a human.

70. A method of determining whether a mammal has, or is predisposed to, a disease or condition associated with one or more regulatory regions of a genome, said method including the step of determining whether said mammal comprises one or more of the isolated RNA molecules according to claim 50, wherein the or each nucleotide sequence of said one or more isolated RNA molecules corresponds to a genomic DNA sequence associated with said disease or condition.

71. The method of claim 70, wherein said one or more regulatory regions is a transcriptionally active location and/or region.

72. The method of claim 70, wherein said mammal is a human.

73. A nucleic acid array comprising a plurality of the isolated RNA molecules of claim 50, or one or more isolated nucleic acids respectively complementary thereto, immobilized, affixed or otherwise mounted to a substrate.

74. A kit comprising one or more of the isolated RNA molecules of claim 50, or one more isolated nucleic acids respectively complementary thereto, and one or more detection reagents.

75. A method of treating a disease or condition in a mammal, said method including the step of administering to said mammal a therapeutic agent comprising the isolated RNA molecule of claim 50, to thereby treat said disease or condition.

76. The method of claim 75, wherein said disease or condition is associated with aberrant regulation of one or more genes.

77. The method of claim 75, wherein said disease or condition is associated with aberrant transcriptional activity of one or more genes.

78. The method of claim 75, wherein said disease or condition is selected from the group consisting of Crohn's disease, Alzheimer's disease, Parkinson's disease, rheumatoid arthritis, myocardial infarction, diabetes, congenital developmental disorders, coronary heart disease and cancer such as breast cancer, lymphoma, leukemia, aggressive metastatic brain cancers, colorectal cancer, gastric cancer, ovarian cancer and pituitary tumors.

79. The method of claim 75, wherein said mammal is a human.

80. A pharmaceutical composition comprising a therapeutic agent comprising the isolated RNA molecule of claim 50, and a pharmaceutically acceptable carrier, diluent or excipient.

81. A pharmaceutical composition comprising a therapeutic agent comprising the isolated RNA molecule of claim 50, and a pharmaceutically acceptable carrier, diluent or excipient, for use in treating a disease or condition in a mammal.

82. The pharmaceutical composition of claim 80, wherein said disease or condition is associated with aberrant regulation of one or more genes.

83. The pharmaceutical composition of claim 80, wherein said disease or condition is associated with aberrant transcriptional activity of one or more genes.

84. The pharmaceutical composition of claim 80, wherein said disease or condition is selected from the group consisting of Crohn's disease, Alzheimer's disease, Parkinson's disease, rheumatoid arthritis, myocardial infarction, diabetes, congenital developmental disorders, coronary heart disease and cancer such as breast cancer, lymphoma, leukemia, aggressive metastatic brain cancers, colorectal cancer, gastric cancer, ovarian cancer and pituitary tumors.

85. The pharmaceutical composition of claim 80, wherein said mammal is a human.

The application's sequence listing, which the Patent Office published only in electronic form, follows.

SEQUENCE LISTING (17213 sequences)

SEQ ID NO: 1 - DNA, 20 bp, Homo sapiens
aaaaaaaagtcaggggaaca

SEQ ID NO: 2 - DNA, 18 bp, Homo sapiens
aaaaacccggcgggcgag

SEQ ID NO: 3 - DNA, 18 bp, Homo sapiens
aaaaaggtggggggacca

SEQ ID NO: 4 - DNA, 17 bp, Homo sapiens
aaaaccctgcagaacgg

SEQ ID NO: 5 - DNA, 18 bp, Homo sapiens
aaaaccctgcagaacggc

SEQ ID NO: 6 - DNA, 21 bp, Homo sapiens
aaaacgggcggtcgagcagaa

SEQ ID NO: 7 - DNA, 18 bp, Homo sapiens
aaaagactcccccgtctg

SEQ ID NO: 8 - DNA, 20 bp, Homo sapiens
aaaagactgcgaggtggccg

SEQ ID NO: 9 - DNA, 17 bp, Homo sapiens
aaaagagggcggagctg

SEQ ID NO: 10 - DNA, 18 bp, Homo sapiens
aaaagatgacgagactgg

SEQ ID NO: 11 - DNA, 17 bp, Homo sapiens
aaaagatggcggcgggc

SEQ ID NO: 12 - DNA, 19 bp, Homo sapiens
aaaagcgcttcagtagcga

SEQ ID NO: 13 - DNA, 20 bp, Homo sapiens
aaaagcgcttcagtagcgag

SEQ ID NO: 14 - DNA, 17 bp, Homo sapiens
aaaaggacggcaagaag

SEQ ID NO: 15 - DNA, 20 bp, Homo sapiens
aaaaggacggcaagaagcgc

SEQ ID NO: 16 - DNA, 18 bp, Homo sapiens
aaaaggcttggggaaggg

SEQ ID NO: 17 - DNA, 22 bp, Homo sapiens
aaaaggtcccggagagctgagc

SEQ ID NO: 18 - DNA, 23 bp, Homo sapiens
aaaagtttgtacagagggtggaa

SEQ ID NO: 19 - DNA, 16 bp, Homo sapiens
aaaagtttgtttcacc

SEQ ID NO: 20 - DNA, 19 bp, Homo sapiens
aaaataaacagcctctacc

SEQ ID NO: 21 - DNA, 20 bp, Homo sapiens
aaaatccgggtcaaagggtg

SEQ ID NO: 22 - DNA, 17 bp, Homo sapiens
aaaatcctcctcctccg

SEQ ID NO: 23 - DNA, 19 bp, Homo sapiens
aaaatcctgaaaaaaaaaa

SEQ ID NO: 24 - DNA, 18 bp, Homo sapiens
aaaatgccaccagatggc

SEQ ID NO: 25 - DNA, 19 bp, Homo sapiens
aaaatggctgaggagagag

SEQ ID NO: 26 - DNA, 21 bp, Homo sapiens
aaacacggagagggagcccgg

SEQ ID NO: 27 - DNA, 24 bp, Homo sapiens
aaacagcgcggggtccgctatggc

SEQ ID NO: 28 - DNA, 18 bp, Homo sapiens
aaacaggaaaacgagtca

SEQ ID NO: 29 - DNA, 17 bp, Homo sapiens
aaacaggtctgggaggc

SEQ ID NO: 30 - DNA, 19 bp, Homo sapiens
aaacaggtctgggaggcag

SEQ ID NO: 31 - DNA, 21 bp, Homo sapiens
aaacatagagtaccccggcag

SEQ ID NO: 32 - DNA, 17 bp, Homo sapiens
aaaccagaagaaaaata

SEQ ID NO: 33 - DNA, 19 bp, Homo sapiens
aaaccgcagagcccggacg

SEQ ID NO: 34 - DNA, 20 bp, Homo sapiens
aaacctggctttactatggc

SEQ ID NO: 35 - DNA, 18 bp, Homo sapiens
aaacgactcagggactgc

SEQ ID NO: 36 - DNA, 21 bp, Homo sapiens
aaacgatggcggaggaagaag

SEQ ID NO: 37 - DNA, 19 bp, Homo sapiens
aaacgcggcggcgggaggc

SEQ ID NO: 38 - DNA, 21 bp, Homo sapiens
aaacggaagtgtaggttacgg

SEQ ID NO: 39 - DNA, 20 bp, Homo sapiens
aaactccgcggagcgcgcgc

SEQ ID NO: 40 - DNA, 16 bp, Homo sapiens
aaactctgtacacggc

SEQ ID NO: 41 - DNA, 20 bp, Homo sapiens
aaactctgtacacggccact

SEQ ID NO: 42 - DNA, 17 bp, Homo sapiens
aaactgagcgtgggcct

SEQ ID NO: 43 - DNA, 19 bp, Homo sapiens
aaactggaagatgaacggg

SEQ ID NO: 44 - DNA, 16 bp, Homo sapiens
aaactggctagaagac

SEQ ID NO: 45 - DNA, 20 bp, Homo sapiens
aaactggctagaagacagca

SEQ ID NO: 46 - DNA, 18 bp, Homo sapiens
aaactggggacatggcag

SEQ ID NO: 47 - DNA, 19 bp, Homo sapiens
aaactgttgggagaggaat

SEQ ID NO: 48 - DNA, 17 bp, Homo sapiens
aaagaacatggcgggcg

SEQ ID NO: 49 - DNA, 21 bp, Homo sapiens
aaagaactttggggatgggga

SEQ ID NO: 50 - DNA, 17 bp, Homo sapiens
aaagaagtttgctgacg

SEQ ID NO: 51 - DNA, 23 bp, Homo sapiens
aaagaatcgtgacgggcaggaaa

SEQ ID NO: 52 - DNA, 17 bp, Homo sapiens
aaagacagagcgggcag

SEQ ID NO: 53 - DNA, 17 bp, Homo sapiens
aaagacggaatcactct

SEQ ID NO: 54 - DNA, 21 bp, Homo sapiens
aaagactgcactattgagaga

SEQ ID NO: 55 - DNA, 17 bp, Homo sapiens
cttcgtttacagttcgg

SEQ ID NO: 56 - DNA, 19 bp, Homo sapiens
cttctcacttccgcttcct

SEQ ID NO: 57 - DNA, 21 bp, Homo sapiens
cttctcacttccgcttccttc

SEQ ID NO: 58 - DNA, 18 bp, Homo sapiens
cttctcagcatggaccgc

SEQ ID NO: 59 - DNA, 21 bp, Homo sapiens
cttctcaggcggtggaggaaa

SEQ ID NO: 60 - DNA, 18 bp, Homo sapiens
cttctcctcgcttctgga

SEQ ID NO: 61 - DNA, 16 bp, Homo sapiens
cttctcgggctgggct

SEQ ID NO: 62 - DNA, 18 bp, Homo sapiens
cttctctcgccaggcgtc

SEQ ID NO: 63 - DNA, 20 bp, Homo sapiens
cttctctgtccaatgcccac

SEQ ID NO: 64 - DNA, 17 bp, Homo sapiens
cttctctgtctctgccg

SEQ ID NO: 65 - DNA, 18 bp, Homo sapiens
cttctggggacgcggccc

SEQ ID NO: 66 - DNA, 18 bp, Homo sapiens
cttcttcttataaataca

SEQ ID NO: 67 - DNA, 19 bp, Homo sapiens
cttgaaacggcgcctgggt

SEQ ID NO: 68 - DNA, 18 bp, Homo sapiens
cttgaaagggttttggtt

SEQ ID NO: 69 - DNA, 18 bp, Homo sapiens
cttgacgagtgagccggg

SEQ ID NO: 70 - DNA, 18 bp, Homo sapiens
cttgacgtgatggggctt

SEQ ID NO: 71 - DNA, 17 bp, Homo sapiens
cttgaggagaagcgcca

SEQ ID NO: 72 - DNA, 18 bp, Homo sapiens
cttgaggttcgggtagtc

SEQ ID NO: 73 - DNA, 19 bp, Homo sapiens
cttgagtagctgggcctgt

SEQ ID NO: 74 - DNA, 18 bp, Homo sapiens
cttgatgaaggggaagca

SEQ ID NO: 75 - DNA, 18 bp, Homo sapiens
cttgcaggccgggcagtg

SEQ ID NO: 76 - DNA, 18 bp, Homo sapiens
cttgcagggcggtggggc

SEQ ID NO: 77 - DNA, 19 bp, Homo sapiens
cttgcgcggcgcaacaggg

SEQ ID NO: 78 - DNA, 18 bp, Homo sapiens
cttgcgtacggaggtgag

SEQ ID NO: 79 - DNA, 15 bp, Homo sapiens
cttgcgtcagggacc

SEQ ID NO: 80 - DNA, 18 bp, Homo sapiens
cttgctaaagagccgagc

SEQ ID NO: 81 - DNA, 20 bp, Homo sapiens
cttgctggcccgcggggctg

SEQ ID NO: 82 - DNA, 18 bp, Homo sapiens
cttgctggggatgaggtg

SEQ ID NO: 83 - DNA, 17 bp, Homo sapiens
cttgcttcctgtttgtc

SEQ ID NO: 84 - DNA, 17 bp, Homo sapiens
cttggaaaagcaaggag

SEQ ID NO: 85 - DNA, 18 bp, Homo sapiens
cttggaagaagatgtctg

SEQ ID NO: 86 - DNA, 22 bp, Homo sapiens
cttggaccgggcccggtcagct

SEQ ID NO: 87 - DNA, 18 bp, Homo sapiens
cttggacgctgcagagtg

SEQ ID NO: 88 - DNA, 19 bp, Homo sapiens
cttggacttcggggcggcc

SEQ ID NO: 89 - DNA, 18 bp, Homo sapiens
cttggagcgcagaaccgg

SEQ ID NO: 90 - DNA, 22 bp, Homo sapiens
cttggaggtggaggggacgcgg

SEQ ID NO: 91 - DNA, 17 bp, Homo sapiens
cttggatgtgggaggat

SEQ ID NO: 92 - DNA, 20 bp, Homo sapiens
cttggatgtgggaggattgc

SEQ ID NO: 93 - DNA, 23 bp, Homo sapiens
cttggcactagcggcgcccgggc

SEQ ID NO: 94 - DNA, 16 bp, Homo sapiens
cttggccagaggcgcc

SEQ ID NO: 95 - DNA, 18 bp, Homo sapiens
cttggccggagctggagc

SEQ ID NO: 96 - DNA, 21 bp, Homo sapiens
cttggcggacagacaggcgag

SEQ ID NO: 97 - DNA, 18 bp, Homo sapiens
cttggcgggacggggctt

SEQ ID NO: 98 - DNA, 17 bp, Homo sapiens
cttggctagaggacgcg

SEQ ID NO: 99 - DNA, 18 bp, Homo sapiens
cttggctgttggtcggtg

SEQ ID NO: 100 - DNA, 20 bp, Homo sapiens
cttgggagctggggaggagg

SEQ ID NO: 101 - DNA, 19 bp, Homo sapiens
cttgggctttgcacccggc

SEQ ID NO: 102 - DNA, 20 bp, Homo sapiens
cttggggtcttttcccaagg

SEQ ID NO: 103 - DNA, 18 bp, Homo sapiens
cttggtaccatgtgggaa

SEQ ID NO: 104 - DNA, 17 bp, Homo sapiens
cttggtagggattgggg

SEQ ID NO: 105 - DNA, 19 bp, Homo sapiens
cttggtagggattggggtc

SEQ ID NO: 106 - DNA, 16 bp, Homo sapiens
cttggtcttagttccc

SEQ ID NO: 107 - DNA, 18 bp, Homo sapiens
cttggtggactgtcactg

SEQ ID NO: 108 - DNA, 18 bp, Homo sapiens
cttggtgggtggggacgg

SEQ ID NO: 109 - DNA, 19 bp, Homo sapiens
aaagactgcgaggtggccg

SEQ ID NO: 110 - DNA, 17 bp, Homo sapiens
aaagactgtggggcgga

SEQ ID NO: 111 - DNA, 21 bp, Homo sapiens
aaagagcgagagaaggggaaa

SEQ ID NO: 112 - DNA, 18 bp, Homo sapiens
aaagatcgttagagacag

SEQ ID NO: 113 - DNA, 19 bp, Homo sapiens
aaagatcgttagagacagc

SEQ ID NO: 114 - DNA, 18 bp, Homo sapiens
aaagatgagctgttcccg

SEQ ID NO: 115 - DNA, 19 bp, Homo sapiens
aaagatgatgatgggttgt

SEQ ID NO: 116 - DNA, 22 bp, Homo sapiens
aaagatggccgccctgttgttt

SEQ ID NO: 117 - DNA, 21 bp, Homo sapiens
aaagatggcgacagccgagaa

SEQ ID NO: 118 - DNA, 24 bp, Homo sapiens
aaagatggtgcttatggggcaggt

SEQ ID NO: 119 - DNA, 19 bp, Homo sapiens
aaagatggtggaggaggag

SEQ ID NO: 120 - DNA, 17 bp, Homo sapiens
aaagatgtcggagcgaa

SEQ ID NO: 121 - DNA, 19 bp, Homo sapiens
aaagcaacaagaaggaaga

SEQ ID NO: 122 - DNA, 17 bp, Homo sapiens
aaagccaaccaatggta

SEQ ID NO: 123 - DNA, 20 bp, Homo sapiens
aaagccagggagacccaagg

SEQ ID NO: 124 - DNA, 17 bp, Homo sapiens
aaagccccagaaacaaa

SEQ ID NO: 125 - DNA, 17 bp, Homo sapiens
aaagccggtcggaactg

SEQ ID NO: 126 - DNA, 20 bp, Homo sapiens
aaagccgtttccgtggaatc

SEQ ID NO: 127 - DNA, 16 bp, Homo sapiens
aaagcgactttcgcta

SEQ ID NO: 128 - DNA, 20 bp, Homo sapiens
aaagcgagacaggcaggtag

SEQ ID NO: 129 - DNA, 23 bp, Homo sapiens
aaagcgaggccggggactgaagg

SEQ ID NO: 130 - DNA, 17 bp, Homo sapiens
aaagcgctgagggagct

SEQ ID NO: 131 - DNA, 16 bp, Homo sapiens
aaagcggatcagagag

SEQ ID NO: 132 - DNA, 23 bp, Homo sapiens
aaagcggtagcgggagcccggcc

SEQ ID NO: 133 - DNA, 16 bp, Homo sapiens
aaagctccagagacac

SEQ ID NO: 134 - DNA, 17 bp, Homo sapiens
aaagctgacctaatgaa

SEQ ID NO: 135 - DNA, 18 bp, Homo sapiens
aaagcttgagtcgggggg

SEQ ID NO: 136 - DNA, 16 bp, Homo sapiens
aaaggacggcaagaag

SEQ ID NO: 137 - DNA, 18 bp, Homo sapiens
aaaggacggcaagaagcg

SEQ ID NO: 138 - DNA, 19 bp, Homo sapiens
aaaggagcgcggcctccag

SEQ ID NO: 139 - DNA, 21 bp, Homo sapiens
aaaggaggagggcgctccagg

SEQ ID NO: 140 - DNA, 18 bp, Homo sapiens
aaaggagtcaagacacct

SEQ ID NO: 141 - DNA, 18 bp, Homo sapiens
aaaggagtcggaagaggt

SEQ ID NO: 142 - DNA, 18 bp, Homo sapiens
aaaggatggcgctgtgac

SEQ ID NO: 143 - DNA, 24 bp, Homo sapiens
aaaggcacattggcggccagggcc

SEQ ID NO: 144 - DNA, 18 bp, Homo sapiens
aaaggcgactcgacaccg

SEQ ID NO: 145 - DNA, 17 bp, Homo sapiens
aaaggcgggcagcagac

SEQ ID NO: 146 - DNA, 18 bp, Homo sapiens
aaaggctcgcagcggcca

SEQ ID NO: 147 - DNA, 20 bp, Homo sapiens
aaaggctgcaggctgccagg

SEQ ID NO: 148 - DNA, 18 bp, Homo sapiens
aaagggacggagccaaga

SEQ ID NO: 149 - DNA, 19 bp, Homo sapiens
aaagggagtgggactggcg

SEQ ID NO: 150 - DNA, 19 bp, Homo sapiens
aaagggccggagattgcgg

SEQ ID NO: 151 - DNA, 18 bp, Homo sapiens
aaaggtgggcctgggttg

SEQ ID NO: 152 - DNA, 18 bp, Homo sapiens
aaaggttcctgcctctcc

SEQ ID NO: 153 - DNA, 22 bp, Homo sapiens
aaagtaggttgggagtggaagg

SEQ ID NO: 154 - DNA, 18 bp, Homo sapiens
aaagtggccgtagcctct

SEQ ID NO: 155 - DNA, 18 bp, Homo sapiens
aaagtgtgagagggtccg

SEQ ID NO: 156 - DNA, 19 bp, Homo sapiens
aaagtgtgcgggaggggcg

SEQ ID NO: 157 - DNA, 19 bp, Homo sapiens
aaagttgggggtggagtgg

SEQ ID NO: 158 - DNA, 19 bp, Homo sapiens
aaagttgtctgcgtctcga

SEQ ID NO: 159 - DNA, 18 bp, Homo sapiens
aaagttgtgagccgagca

SEQ ID NO: 160 - DNA, 20 bp, Homo sapiens
aaagtttgttgtggggttgg

SEQ ID NO: 161 - DNA, 19 bp, Homo sapiens
aaataaacgtggcgggacg

SEQ ID NO: 162 - DNA, 18 bp, Homo sapiens
aaataatctcggaaaggc

SEQ ID NO: 163 - DNA, 19 bp, Homo sapiens
aaataatggcaaactcgac

SEQ ID NO: 164 - DNA, 18 bp, Homo sapiens
aaatatcgagagggacga

SEQ ID NO: 165 - DNA, 20 bp, Homo sapiens
aaatccaagcaggtgctttg

SEQ ID NO: 166 - DNA, 17 bp, Homo sapiens
cttgtcttctctcctca

SEQ ID NO: 167 - DNA, 18 bp, Homo sapiens
cttgtggagccggagctg

SEQ ID NO: 168 - DNA, 20 bp, Homo sapiens
ctttaaattttgcaatgtaa

SEQ ID NO: 169 - DNA, 18 bp, Homo sapiens
ctttacccggacgaaaga

SEQ ID NO: 170 - DNA, 18 bp, Homo sapiens
ctttacggtactaggcac

SEQ ID NO: 171 - DNA, 18 bp, Homo sapiens
ctttactatggcggttgg

SEQ ID NO: 172 - DNA, 17 bp, Homo sapiens
ctttaggttgtggacga

SEQ ID NO: 173 - DNA, 17 bp, Homo sapiens
ctttcaaccttgtcaac

SEQ ID NO: 174 - DNA, 18 bp, Homo sapiens
ctttcacccatgggaagt

SEQ ID NO: 175 - DNA, 19 bp, Homo sapiens
ctttcagagcatagctttc

SEQ ID NO: 176 - DNA, 20 bp, Homo sapiens
ctttccagcctcagtcggac

SEQ ID NO: 177 - DNA, 17 bp, Homo sapiens
ctttccattcagtcgcc

SEQ ID NO: 178 - DNA, 19 bp, Homo sapiens
ctttcccaagatggcgtcg

SEQ ID NO: 179 - DNA, 18 bp, Homo sapiens
ctttcccatcttgcaagg

SEQ ID NO: 180 - DNA, 18 bp, Homo sapiens
ctttccccttctctgtgt

SEQ ID NO: 181 - DNA, 18 bp, Homo sapiens
ctttccgctggtcgtcgc

SEQ ID NO: 182 - DNA, 18 bp, Homo sapiens
ctttccggagcgcgggcg

SEQ ID NO: 183 - DNA, 18 bp, Homo sapiens
ctttccgtctctggccgg

SEQ ID NO: 184 - DNA, 21 bp, Homo sapiens
ctttcgctcaggcccgtggcg

SEQ ID NO: 185 - DNA, 18 bp, Homo sapiens
ctttcggagggtggtgag

SEQ ID NO: 186 - DNA, 17 bp, Homo sapiens
ctttcggcatcagtagg

SEQ ID NO: 187 - DNA, 14 bp, Homo sapiens
ctttcgggcgccat

SEQ ID NO: 188 - DNA, 16 bp, Homo sapiens
ctttctcaactatggc

SEQ ID NO: 189 - DNA, 17 bp, Homo sapiens
ctttctcaactatggcc

SEQ ID NO: 190 - DNA, 18 bp, Homo sapiens
ctttctcaactatggccc

SEQ ID NO: 191 - DNA, 18 bp, Homo sapiens
ctttctcgactccatctt

SEQ ID NO: 192 - DNA, 19 bp, Homo sapiens
ctttctctggcagtaggca

SEQ ID NO: 193 - DNA, 18 bp, Homo sapiens
ctttcttggccagaggcg

SEQ ID NO: 194 - DNA, 18 bp, Homo sapiens
ctttctttccctctccgt

SEQ ID NO: 195 - DNA, 18 bp, Homo sapiens
ctttctttccgtcgcaga

SEQ ID NO: 196 - DNA, 17 bp, Homo sapiens
ctttctttttgaggaag

SEQ ID NO: 197 - DNA, 18 bp, Homo sapiens
ctttctttttgaggaaga

SEQ ID NO: 198 - DNA, 17 bp, Homo sapiens
ctttgccggccgccgcg

SEQ ID NO: 199 - DNA, 18 bp, Homo sapiens
ctttgctctggcacaaca

SEQ ID NO: 200 - DNA, 24 bp, Homo sapiens
ctttggaaccgcggcgtgagcgcc

SEQ ID NO: 201 - DNA, 16 bp, Homo sapiens
ctttggaggcggtagc

SEQ ID NO: 202 - DNA, 20 bp, Homo sapiens
ctttggcgctgctgagagag

SEQ ID NO: 203 - DNA, 18 bp, Homo sapiens
ctttgggcaggggtagtg

SEQ ID NO: 204 - DNA, 16 bp, Homo sapiens
ctttggtccgctgcag

SEQ ID NO: 205 - DNA, 20 bp, Homo sapiens
ctttggtggaaccatcacta

SEQ ID NO: 206 - DNA, 19 bp, Homo sapiens
ctttgtgagttggggattg

SEQ ID NO: 207 - DNA, 17 bp, Homo sapiens
cttttccggattgggca

SEQ ID NO: 208 - DNA, 20 bp, Homo sapiens
cttttccgtgggagtaagga

SEQ ID NO: 209 - DNA, 19 bp, Homo sapiens
cttttcgcggccgggcccc

SEQ ID NO: 210 - DNA, 19 bp, Homo sapiens
cttttctcgcgctggtctc

SEQ ID NO: 211 - DNA, 23 bp, Homo sapiens
ctttttctaggacttggggggaa

SEQ ID NO: 212 - DNA, 16 bp, Homo sapiens
ctttttgtccgacatc

SEQ ID NO: 213 - DNA, 17 bp, Homo sapiens
gaaaaagccccaccgct

SEQ ID NO: 214 - DNA, 19 bp, Homo sapiens
gaaaaagctgacctaatga

SEQ ID NO: 215 - DNA, 19 bp, Homo sapiens
gaaaaaggacggcaagaag

SEQ ID NO: 216 - DNA, 18 bp, Homo sapiens
gaaaacacaaagggccgg

SEQ ID NO: 217 - DNA, 18 bp, Homo sapiens
gaaaacacggagagggag

SEQ ID NO: 218 - DNA, 19 bp, Homo sapiens
gaaaagaggagagagcgag

SEQ ID NO: 219 - DNA, 18 bp, Homo sapiens
gaaaagatcgttagagac

SEQ ID NO: 220 - DNA, 18 bp, Homo sapiens
gaaaagcagtaggatcgg

SEQ ID NO: 221 - DNA, 19 bp, Homo sapiens
gaaaagcgagagcggggca

SEQ ID NO: 222 - DNA, 18 bp, Homo sapiens
gaaaagggagaggaagcc

SEQ ID NO: 223 - DNA, 20 bp, Homo sapiens
aaatccagagcggcgggcac

SEQ ID NO: 224 - DNA, 23 bp, Homo sapiens
aaatccggatcgttgggactgcg

SEQ ID NO: 225 - DNA, 16 bp, Homo sapiens
aaatcggccgttggga

SEQ ID NO: 226 - DNA, 16 bp, Homo sapiens
aaatcggggcgagtgg

SEQ ID NO: 227 - DNA, 17 bp, Homo sapiens
aaatcggtacaagatgg

SEQ ID NO: 228 - DNA, 22 bp, Homo sapiens
aaatctcaatgaactatttgta

SEQ ID NO: 229 - DNA, 20 bp, Homo sapiens
aaatgatcgagatggcggcg

SEQ ID NO: 230 - DNA, 18 bp, Homo sapiens
aaatgatggcgactggaa

SEQ ID NO: 231 - DNA, 21 bp, Homo sapiens
aaatgcagagctggagtcgtg

SEQ ID NO: 232 - DNA, 18 bp, Homo sapiens
aaatggagcggtggctcc

SEQ ID NO: 233 - DNA, 18 bp, Homo sapiens
aaatggctgaggagagag

SEQ ID NO: 234 - DNA, 16 bp, Homo sapiens
aaatggctgcccgagg

SEQ ID NO: 235 - DNA, 21 bp, Homo sapiens
aaatggctgcccgagggagac

SEQ ID NO: 236 - DNA, 20 bp, Homo sapiens
aaatgggagatggtaggggc

SEQ ID NO: 237 - DNA, 16 bp, Homo sapiens
aaatggttgtggacta

SEQ ID NO: 238 - DNA, 19 bp, Homo sapiens
aaattagtcgaaggctgag

SEQ ID NO: 239 - DNA, 16 bp, Homo sapiens
aaattggcttttcccg

SEQ ID NO: 240 - DNA, 18 bp, Homo sapiens
aaatttggtcaaagaagt

SEQ ID NO: 241 - DNA, 22 bp, Homo sapiens
aacaaaacagcgatgccacggc

SEQ ID NO: 242 - DNA, 20 bp, Homo sapiens
aacaaacctcgcctggctcc

SEQ ID NO: 243 - DNA, 22 bp, Homo sapiens
aacaaacctcgcctggctccca

SEQ ID NO: 244 - DNA, 21 bp, Homo sapiens
aacaaccaccgctgccagctg

SEQ ID NO: 245 - DNA, 20 bp, Homo sapiens
aacaacttaggaccaaattg

SEQ ID NO: 246 - DNA, 18 bp, Homo sapiens
aacaagggaaagagccgg

SEQ ID NO: 247 - DNA, 18 bp, Homo sapiens
aacacagacgactgggct

SEQ ID NO: 248 - DNA, 17 bp, Homo sapiens
aacacctacaacaggca

SEQ ID NO: 249 - DNA, 18 bp, Homo sapiens
aacactcggaggtggcgg

SEQ ID NO: 250 - DNA, 19 bp, Homo sapiens
aacactgtagccgccaccg

SEQ ID NO: 251 - DNA, 17 bp, Homo sapiens
aacagaggggactagca

SEQ ID NO: 252 - DNA, 17 bp, Homo sapiens
aacagcctcccgccgag

SEQ ID NO: 253 - DNA, 18 bp, Homo sapiens
aacagcgagagtctgggc

SEQ ID NO: 254 - DNA, 16 bp, Homo sapiens
aacagcgcagggcatt

SEQ ID NO: 255 - DNA, 17 bp, Homo sapiens
aacagcggacggagggg

SEQ ID NO: 256 - DNA, 18 bp, Homo sapiens
aacagcggacggaggggc

SEQ ID NO: 257 - DNA, 19 bp, Homo sapiens
aacagctctcaaggacgtg

SEQ ID NO: 258 - DNA, 20 bp, Homo sapiens
aacaggaagagagaagctgg

SEQ ID NO: 259 - DNA, 21 bp, Homo sapiens
aacaggcaagaaggacttggt

SEQ ID NO: 260 - DNA, 24 bp, Homo sapiens
aacaggcagcagcgcagcgggcgc

SEQ ID NO: 261 - DNA, 21 bp, Homo sapiens
aacagggaaaaagcaacaaga

SEQ ID NO: 262 - DNA, 18 bp, Homo sapiens
aacagtaagagctgccct

SEQ ID NO: 263 - DNA, 18 bp, Homo sapiens
aacagtgtgggggaggca

SEQ ID NO: 264 - DNA, 18 bp, Homo sapiens
aacagtttgcaaaccgag

SEQ ID NO: 265 - DNA, 19 bp, Homo sapiens
aacataaaagtttgtttca

SEQ ID NO: 266 - DNA, 18 bp, Homo sapiens
aacatcgggcagcatgag

SEQ ID NO: 267 - DNA, 22 bp, Homo sapiens
aacatcgggcagcatgagcggc

SEQ ID NO: 268 - DNA, 18 bp, Homo sapiens
aacatgatctctagactg

SEQ ID NO: 269 - DNA, 19 bp, Homo sapiens
aacatgatctctagactgg

SEQ ID NO: 270 - DNA, 21 bp, Homo sapiens
aacatgctctgtctgtgcctg

SEQ ID NO: 271 - DNA, 19 bp, Homo sapiens
aacatggcggagctgacgg

SEQ ID NO: 272 - DNA, 19 bp, Homo sapiens
aacatggcggatcggctca

SEQ ID NO: 273 - DNA, 18 bp, Homo sapiens
aacatggcggttccggcc

SEQ ID NO: 274 - DNA, 22 bp, Homo sapiens
aacatggctccagcgacctcag

SEQ ID NO: 275 - DNA, 18 bp, Homo sapiens
aacatgtcgcgcctgaag

SEQ ID NO: 276 - DNA, 19 bp, Homo sapiens
aacattccagaggtgagtc

SEQ ID NO: 277 - DNA, 19 bp, Homo sapiens
aaccaagatggcggcggtt

SEQ ID NO: 278 - DNA, 18 bp, Homo sapiens
aaccatcagcgcctcctg

SEQ ID NO: 279 - DNA, 16 bp, Homo sapiens
aacccaatatggcagc

SEQ ID NO: 280 - DNA, 19 bp, Homo sapiens
gaaacaaagcagtcggctc

SEQ ID NO: 281 - DNA, 19 bp, Homo sapiens
gaaacaaagggctgtccgg

SEQ ID NO: 282 - DNA, 19 bp, Homo sapiens
gaaacaggaacaatggcta

SEQ ID NO: 283 - DNA, 18 bp, Homo sapiens
gaaacccagcaggcggcg

SEQ ID NO: 284 - DNA, 18 bp, Homo sapiens
gaaacctggttgttgctg

SEQ ID NO: 285 - DNA, 23 bp, Homo sapiens
gaaacgaaaagggctagggggtg

SEQ ID NO: 286 - DNA, 20 bp, Homo sapiens
gaaacgcaacctgggcggct

SEQ ID NO: 287 - DNA, 18 bp, Homo sapiens
gaaacggcgtggaggctt

SEQ ID NO: 288 - DNA, 17 bp, Homo sapiens
gaaacggtagcttagga

SEQ ID NO: 289 - DNA, 17 bp, Homo sapiens
gaaactggctagaagac

SEQ ID NO: 290 - DNA, 19 bp, Homo sapiens
gaaactgtaggacaaggcc

SEQ ID NO: 291 - DNA, 19 bp, Homo sapiens
gaaagaagtttgctgacga

SEQ ID NO: 292 - DNA, 21 bp, Homo sapiens
gaaagaagtttgctgacgaag

SEQ ID NO: 293 - DNA, 16 bp, Homo sapiens
gaaagaggtaggaccg

SEQ ID NO: 294 - DNA, 18 bp, Homo sapiens
gaaagatggcggaaaatt

SEQ ID NO: 295 - DNA, 21 bp, Homo sapiens
gaaagatggcggagcaagagt

SEQ ID NO: 296 - DNA, 20 bp, Homo sapiens
gaaagatggcggcggaaacg

SEQ ID NO: 297 - DNA, 18 bp, Homo sapiens
gaaagcgggaagactcat

SEQ ID NO: 298 - DNA, 20 bp, Homo sapiens
gaaagctgttcaccgttttc

SEQ ID NO: 299 - DNA, 18 bp, Homo sapiens
gaaaggacggggagtgtt

SEQ ID NO: 300 - DNA, 18 bp, Homo sapiens
gaaaggagtgcagagagg

SEQ ID NO: 301 - DNA, 17 bp, Homo sapiens
gaaaggcttgaggacca

SEQ ID NO: 302 - DNA, 20 bp, Homo sapiens
gaaaggcttgaggaccaggt

SEQ ID NO: 303 - DNA, 18 bp, Homo sapiens
gaaagggagagtgctggg

SEQ ID NO: 304 - DNA, 20 bp, Homo sapiens
gaaagggagagtgctgggcg

SEQ ID NO: 305 - DNA, 17 bp, Homo sapiens
gaaagggtaccggtgac

SEQ ID NO: 306 - DNA, 18 bp, Homo sapiens
gaaaggtaagcggcggct

SEQ ID NO: 307 - DNA, 20 bp, Homo sapiens
gaaagtagtaacagcagtag

SEQ ID NO: 308 - DNA, 16 bp, Homo sapiens
gaaagtcgcgtccgca

SEQ ID NO: 309 - DNA, 18 bp, Homo sapiens
gaaagttggcggggctgc

SEQ ID NO: 310 - DNA, 20 bp, Homo sapiens
gaaagttgtctgcgtctcga

SEQ ID NO: 311 - DNA, 21 bp, Homo sapiens
gaaagttgtctgcgtctcgag

SEQ ID NO: 312 - DNA, 23 bp, Homo sapiens
gaaatccgtctctgtgagcggag

SEQ ID NO: 313 - DNA, 22 bp, Homo sapiens
gaaatgactgcgaaccggcttg

SEQ ID NO: 314 - DNA, 18 bp, Homo sapiens
gaaatgtagttcggcgca

SEQ ID NO: 315 - DNA, 23 bp, Homo sapiens
gaaattccagtttacgtcgaagc

SEQ ID NO: 316 - DNA, 19 bp, Homo sapiens
gaacaaagatggcggccgc

SEQ ID NO: 317 - DNA, 18 bp, Homo sapiens
gaacacaaggagatcgac

SEQ ID NO: 318 - DNA, 18 bp, Homo sapiens
gaacacgaggccaagagc

SEQ ID NO: 319 - DNA, 18 bp, Homo sapiens
gaacagatccggggactc

SEQ ID NO: 320 - DNA, 18 bp, Homo sapiens
gaacaggaagaggacgaa

SEQ ID NO: 321 - DNA, 22 bp, Homo sapiens
gaacaggcggcgaagactgaag

SEQ ID NO: 322 - DNA, 18 bp, Homo sapiens
gaacagggaagatggcgg

SEQ ID NO: 323 - DNA, 18 bp, Homo sapiens
gaacatggcgacacggag

SEQ ID NO: 324 - DNA, 19 bp, Homo sapiens
gaacatgtcgcgcctgaag

SEQ ID NO: 325 - DNA, 17 bp, Homo sapiens
gaaccaggaaggattaa

SEQ ID NO: 326 - DNA, 17 bp, Homo sapiens
gaaccaggagatgcggc

SEQ ID NO: 327 - DNA, 18 bp, Homo sapiens
gaaccaggggcttactgc

SEQ ID NO: 328 - DNA, 19 bp, Homo sapiens
gaaccatcggagcagaagc

SEQ ID NO: 329 - DNA, 18 bp, Homo sapiens
gaacccggagcagggtcc

SEQ ID NO: 330 - DNA, 19 bp, Homo sapiens
gaacccgggctcttcctcg

SEQ ID NO: 331 - DNA, 18 bp, Homo sapiens
gaaccggaaaaaacagaa

SEQ ID NO: 332 - DNA, 16 bp, Homo sapiens
gaaccgggaggtacta

SEQ ID NO: 333 - DNA, 17 bp, Homo sapiens
gaaccgggcggagcggc

SEQ ID NO: 334 - DNA, 17 bp, Homo sapiens
gaacctttgcacgcgca

SEQ ID NO: 335 - DNA, 16 bp, Homo sapiens
gaacgaggagtagagg

SEQ ID NO: 336 - DNA, 15 bp, Homo sapiens
gaacgaggccgtcgg

SEQ ID NO: 337 - DNA, 17 bp, Homo sapiens
aacccagatcccgaggt

SEQ ID NO: 338 - DNA, 17 bp, Homo sapiens
aacccagcaggcggcga

SEQ ID NO: 339 - DNA, 16 bp, Homo sapiens
aacccatcaggaagtg

SEQ ID NO: 340 - DNA, 20 bp, Homo sapiens
aaccccggactgaggcaggg

SEQ ID NO: 341 - DNA, 23 bp, Homo sapiens
aaccccggactgaggcaggggtc

SEQ ID NO: 342 - DNA, 18 bp, Homo sapiens
aacccggaccctaagaag

SEQ ID NO: 343 - DNA, 18 bp, Homo sapiens
aacccggagcagggtccc

SEQ ID NO: 344 - DNA, 18 bp, Homo sapiens
aacccggcgcaggaactg

SEQ ID NO: 345 - DNA, 18 bp, Homo sapiens
aacccgggcctggctgag

SEQ ID NO: 346 - DNA, 16 bp, Homo sapiens
aaccctagaagggaaa

SEQ ID NO: 347 - DNA, 15 bp, Homo sapiens
aaccctaggaactct

SEQ ID NO: 348 - DNA, 16 bp, Homo sapiens
aacccttgccgctgcc

SEQ ID NO: 349 - DNA, 18 bp, Homo sapiens
aacccttttcttccgcac

SEQ ID NO: 350 - DNA, 20 bp, Homo sapiens
aaccgcaaggagtagcggag

SEQ ID NO: 351 - DNA, 18 bp, Homo sapiens
aaccgccgctcgggcctc

SEQ ID NO: 352 - DNA, 18 bp, Homo sapiens
aaccgcggcgtgagcgcc

SEQ ID NO: 353 - DNA, 18 bp, Homo sapiens
aaccgctaccgggagcgc

SEQ ID NO: 354 - DNA, 20 bp, Homo sapiens
aaccggaagcgtgggtctgg

SEQ ID NO: 355 - DNA, 17 bp, Homo sapiens
aaccggatcggtgactg

SEQ ID NO: 356 - DNA, 15 bp, Homo sapiens
aaccggcgatttctc

SEQ ID NO: 357 - DNA, 18 bp, Homo sapiens
aaccgggcaggagcagcc

SEQ ID NO: 358 - DNA, 18 bp, Homo sapiens
aaccgtacgtccgtttgt

SEQ ID NO: 359 - DNA, 20 bp, Homo sapiens
aaccgtacgtccgtttgtcc

SEQ ID NO: 360 - DNA, 20 bp, Homo sapiens
aaccgtcgtgggctgcccgc

SEQ ID NO: 361 - DNA, 18 bp, Homo sapiens
aaccgtgaggactgcggg

SEQ ID NO: 362 - DNA, 18 bp, Homo sapiens
aaccgttcttattgctgg

SEQ ID NO: 363 - DNA, 19 bp, Homo sapiens
aacctaaagactagaggcg

SEQ ID NO: 364 - DNA, 17 bp, Homo sapiens
aacctagtgctgatcgc

SEQ ID NO: 365 - DNA, 16 bp, Homo sapiens
aacctctggagtaggc

SEQ ID NO: 366 - DNA, 17 bp, Homo sapiens
aacctgctaagtccgct

SEQ ID NO: 367 - DNA, 20 bp, Homo sapiens
aacctttactccagagatca

SEQ ID NO: 368 - DNA, 16 bp, Homo sapiens
aacctttgcacgcgca

SEQ ID NO: 369 - DNA, 18 bp, Homo sapiens
aacgaaagatggcggcgc

SEQ ID NO: 370 - DNA, 18 bp, Homo sapiens
aacgaacgggcggtgtag

SEQ ID NO: 371 - DNA, 21 bp, Homo sapiens
aacgaagtcgtggaggtggcg

SEQ ID NO: 372 - DNA, 21 bp, Homo sapiens
aacgacgccgggcagcgggag

SEQ ID NO: 373 - DNA, 18 bp, Homo sapiens
aacgagactgcacggtga

SEQ ID NO: 374 - DNA, 19 bp, Homo sapiens
aacgagactgcacggtgag

SEQ ID NO: 375 - DNA, 18 bp, Homo sapiens
aacgagctcgggcctcac

SEQ ID NO: 376 - DNA, 18 bp, Homo sapiens
aacgaggagtagaggagc

SEQ ID NO: 377 - DNA, 19 bp, Homo sapiens
aacgagggttcccgggatt

SEQ ID NO: 378 - DNA, 18 bp, Homo sapiens
aacgaggtgcgggacgga

SEQ ID NO: 379 - DNA, 19 bp, Homo sapiens
aacgcaactttgaggagac

SEQ ID NO: 380 - DNA, 14 bp, Homo sapiens
aacgcacttgcggc

SEQ ID NO: 381 - DNA, 17 bp, Homo sapiens
aacgcagcgaaggacta

SEQ ID NO: 382 - DNA, 18 bp, Homo sapiens
aacgcagctggcagcggc

SEQ ID NO: 383 - DNA, 20 bp, Homo sapiens
aacgcagtgaccgaaggctc

SEQ ID NO: 384 - DNA, 21 bp, Homo sapiens
aacgccaaccgctccgctgcg

SEQ ID NO: 385 - DNA, 16 bp, Homo sapiens
aacgcctttccagtac

SEQ ID NO: 386 - DNA, 22 bp, Homo sapiens
aacgcgaggggctgctggggtg

SEQ ID NO: 387 - DNA, 17 bp, Homo sapiens
aacgcgagtgggagcac

SEQ ID NO: 388 - DNA, 19 bp, Homo sapiens
aacgcgagtgggagcacca

SEQ ID NO: 389 - DNA, 20 bp, Homo sapiens
aacgcgagtgggagcaccag

SEQ ID NO: 390 - DNA, 19 bp, Homo sapiens
aacgcgggagtggatgggc

SEQ ID NO: 391 - DNA, 23 bp, Homo sapiens
aacgctaagggggcttcggaagc

SEQ ID NO: 392 - DNA, 21 bp, Homo sapiens
aacgctacgatgcctgaacct

SEQ ID NO: 393 - DNA, 16 bp, Homo sapiens
aacgctagtttgggcc

SEQ ID NO: 394 - DNA, 21 bp, Homo sapiens
gaacgagttcctcggcggctg

SEQ ID NO: 395 - DNA, 15 bp, Homo sapiens
gaacgcacttgcggc

SEQ ID NO: 396 - DNA, 16 bp, Homo sapiens
gaacgcacttgcggcc

SEQ ID NO: 397 - DNA, 19 bp, Homo sapiens
gaacgccagcgctgaggac

SEQ ID NO: 398 - DNA, 18 bp, Homo sapiens
gaacgcgggcggcgagac

SEQ ID NO: 399 - DNA, 19 bp, Homo sapiens
gaacgcgggcggcgagacg

SEQ ID NO: 400 - DNA, 17 bp, Homo sapiens
gaacgctgccatggctc

SEQ ID NO: 401 - DNA, 18 bp, Homo sapiens
gaacggaaaggagaaggg

SEQ ID NO: 402 - DNA, 18 bp, Homo sapiens
gaacggctgtgggcgtct

SEQ ID NO: 403 - DNA, 16 bp, Homo sapiens
gaacgggagtactgcg

SEQ ID NO: 404 - DNA, 23 bp, Homo sapiens
gaacgggccggcggacggcgaag

SEQ ID NO: 405 - DNA, 18 bp, Homo sapiens
gaacggtgtggagcggag

SEQ ID NO: 406 - DNA, 20 bp, Homo sapiens
gaacggtgtggagcggaggc

SEQ ID NO: 407 - DNA, 17 bp, Homo sapiens
gaactagtggcgggctg

SEQ ID NO: 408 - DNA, 18 bp, Homo sapiens
gaactcgcagagctgggc

SEQ ID NO: 409 - DNA, 20 bp, Homo sapiens
gaactctatctgcctgcatc

SEQ ID NO: 410 - DNA, 21 bp, Homo sapiens
gaactctgaggtgagggtgtg

SEQ ID NO: 411 - DNA, 21 bp, Homo sapiens
gaactggaggaaggagggcaa

SEQ ID NO: 412 - DNA, 19 bp, Homo sapiens
gaactggaggcgtagaaag

SEQ ID NO: 413 - DNA, 21 bp, Homo sapiens
gaactgggagcgcgccgcggc

SEQ ID NO: 414 - DNA, 17 bp, Homo sapiens
gaactggggaaactgga

SEQ ID NO: 415 - DNA, 18 bp, Homo sapiens
gaactgtaagtgccaggg

SEQ ID NO: 416 - DNA, 21 bp, Homo sapiens
gaactgttgtggtgcggagcg

SEQ ID NO: 417 - DNA, 18 bp, Homo sapiens
gaagaaacgcggaaccat

SEQ ID NO: 418 - DNA, 18 bp, Homo sapiens
gaagaaaggcgaaggcaa

SEQ ID NO: 419 - DNA, 18 bp, Homo sapiens
gaagaagcgccgggaaag

SEQ ID NO: 420 - DNA, 18 bp, Homo sapiens
gaagaagcggaagaagat

SEQ ID NO: 421 - DNA, 20 bp, Homo sapiens
gaagaaggacagaaagaaga

SEQ ID NO: 422 - DNA, 21 bp, Homo sapiens
gaagaaggacgggaagaagcg

SEQ ID NO: 423 - DNA, 18 bp, Homo sapiens
gaagaagggttccaagaa

SEQ ID NO: 424 - DNA, 20 bp, Homo sapiens
gaagacgcacctcgccagga

SEQ ID NO: 425 - DNA, 19 bp, Homo sapiens
gaagacgggagcgccagaa

SEQ ID NO: 426 - DNA, 16 bp, Homo sapiens
gaagacgggcggagag

SEQ ID NO: 427 - DNA, 21 bp, Homo sapiens
gaagacgggcggagagaaacc

SEQ ID NO: 428 - DNA, 16 bp, Homo sapiens
gaagactaccaggctg

SEQ ID NO: 429 - DNA, 17 bp, Homo sapiens
gaagactcatcggagcg

SEQ ID NO: 430 - DNA, 18 bp, Homo sapiens
gaagactgcgatggtgag

SEQ ID NO: 431 - DNA, 19 bp, Homo sapiens
gaagagaaaaggcggcggc

SEQ ID NO: 432 - DNA, 21 bp, Homo sapiens
gaagagaaccggtcgcggcaa

SEQ ID NO: 433 - DNA, 22 bp, Homo sapiens
gaagagaaccggtcgcggcaat

SEQ ID NO: 434 - DNA, 24 bp, Homo sapiens
gaagagacctggagccgacagacg

SEQ ID NO: 435 - DNA, 18 bp, Homo sapiens
gaagagacgcagaaggag

SEQ ID NO: 436 - DNA, 23 bp, Homo sapiens
gaagagacgcagaaggagagcga

SEQ ID NO: 437 - DNA, 18 bp, Homo sapiens
gaagagctcggaccaagc

SEQ ID NO: 438 - DNA, 23 bp, Homo sapiens
gaagaggaactgggcctgaaagg

SEQ ID NO: 439 - DNA, 20 bp, Homo sapiens
gaagaggacgaaaaaaataa

SEQ ID NO: 440 - DNA, 17 bp, Homo sapiens
gaagaggatggagactg

SEQ ID NO: 441 - DNA, 18 bp, Homo sapiens
gaagaggggcggaggagg

SEQ ID NO: 442 - DNA, 18 bp, Homo sapiens
gaagagggggtcgaggag

SEQ ID NO: 443 - DNA, 21 bp, Homo sapiens
gaagagtcgccggtggccgcg

SEQ ID NO: 444 - DNA, 21 bp, Homo sapiens
gaagagtggcaaagtctccaa

SEQ ID NO: 445 - DNA, 18 bp, Homo sapiens
gaagatagatcgccatca

SEQ ID NO: 446 - DNA, 18 bp, Homo sapiens
gaagatattcgtgggcaa

SEQ ID NO: 447 - DNA, 19 bp, Homo sapiens
gaagatcgaggacacgcta

SEQ ID NO: 448 - DNA, 18 bp, Homo sapiens
gaagatggcgaagacgta

SEQ ID NO: 449 - DNA, 22 bp, Homo sapiens
gaagatggcgccgcggagggtc

SEQ ID NO: 450 - DNA, 20 bp, Homo sapiens
gaagatggcggcttctcagg

SEQ ID NO: 451 - DNA, 21 bp, Homo sapiens
aacgctggcctctgaaactag

SEQ ID NO: 452 - DNA, 20 bp, Homo sapiens
aacggaagtgtaggttacgg

SEQ ID NO: 453 - DNA, 19 bp, Homo sapiens
aacggaccggacagagacg

SEQ ID NO: 454 - DNA, 17 bp, Homo sapiens
aacggacggcgatggcg

SEQ ID NO: 455 - DNA, 18 bp, Homo sapiens
aacggacggcgatggcga

SEQ ID NO: 456 - DNA, 21 bp, Homo sapiens
aacggagaaagtttacgccga

SEQ ID NO: 457 - DNA, 18 bp, Homo sapiens
aacggagaggagcgcgag

SEQ ID NO: 458 - DNA, 16 bp, Homo sapiens
aacggagcggacgcca

SEQ ID NO: 459 - DNA, 19 bp, Homo sapiens
aacggagcggacgccatgg

SEQ ID NO: 460 - DNA, 22 bp, Homo sapiens
aacggagcggacgccatggcga

SEQ ID NO: 461 - DNA, 16 bp, Homo sapiens
aacggagctggcggag

SEQ ID NO: 462 - DNA, 24 bp, Homo sapiens
aacggaggggaaataaaagggaac

SEQ ID NO: 463 - DNA, 17 bp, Homo sapiens
aacggagtcgttggggg

SEQ ID NO: 464 - DNA, 24 bp, Homo sapiens
aacggcctcccagcacagggctat

SEQ ID NO: 465 - DNA, 17 bp, Homo sapiens
aacggcggcgacggcga

SEQ ID NO: 466 - DNA, 18 bp, Homo sapiens
aacgggaaagcagcggaa

SEQ ID NO: 467 - DNA, 19 bp, Homo sapiens
aacgggcggcaggttgcag

SEQ ID NO: 468 - DNA, 17 bp, Homo sapiens
aacgggcggcggaagta

SEQ ID NO: 469 - DNA, 15 bp, Homo sapiens
aacggggactccttg

SEQ ID NO: 470 - DNA, 17 bp, Homo sapiens
aacggggtgggtggctg

SEQ ID NO: 471 - DNA, 15 bp, Homo sapiens
aacggtaggcgtcgc

SEQ ID NO: 472 - DNA, 18 bp, Homo sapiens
aacggtcgcgcggccgtc

SEQ ID NO: 473 - DNA, 18 bp, Homo sapiens
aacggtcttcggaagcgg

SEQ ID NO: 474 - DNA, 15 bp, Homo sapiens
aacggtgtggagcgg

SEQ ID NO: 475 - DNA, 16 bp, Homo sapiens
aacggtgtggagcgga

SEQ ID NO: 476 - DNA, 17 bp, Homo sapiens
aacggtgtggagcggag

SEQ ID NO: 477 - DNA, 18 bp, Homo sapiens
aacggtgtggagcggagg

SEQ ID NO: 478 - DNA, 19 bp, Homo sapiens
aacggtgtggagcggaggc

SEQ ID NO: 479 - DNA, 21 bp, Homo sapiens
aacggtgtggagcggaggccg

SEQ ID NO: 480 - DNA, 18 bp, Homo sapiens
aacgtactatcctcctta

SEQ ID NO: 481 - DNA, 18 bp, Homo sapiens
aacgtgatgaagggctgg

SEQ ID NO: 482 - DNA, 21 bp, Homo sapiens
aacgtgatgaagggctggcag

SEQ ID NO: 483 - DNA, 16 bp, Homo sapiens
aactacggctgcggtg

SEQ ID NO: 484 - DNA, 20 bp, Homo sapiens
aactacggctgcggtgtggt

SEQ ID NO: 485 - DNA, 18 bp, Homo sapiens
aactacggctggtgtggg

SEQ ID NO: 486 - DNA, 23 bp, Homo sapiens
aactaggggtcgggctcggccgt

SEQ ID NO: 487 - DNA, 21 bp, Homo sapiens
aactcaagatggcggacgaga

SEQ ID NO: 488 - DNA, 19 bp, Homo sapiens
aactcatgactcggggagc

SEQ ID NO: 489 - DNA, 18 bp, Homo sapiens
aactccaagggcggaccg

SEQ ID NO: 490 - DNA, 18 bp, Homo sapiens
aactcccagacacctcgc

SEQ ID NO: 491 - DNA, 17 bp, Homo sapiens
aactccgcggagcgcgc

SEQ ID NO: 492 - DNA, 18 bp, Homo sapiens
aactcggaggaaccagag

SEQ ID NO: 493 - DNA, 23 bp, Homo sapiens
aactctagtggctggagtccggg

SEQ ID NO: 494 - DNA, 17 bp, Homo sapiens
aactctgaggtgagggt

SEQ ID NO: 495 - DNA, 18 bp, Homo sapiens
aactctgaggtgagggtg

SEQ ID NO: 496 - DNA, 20 bp, Homo sapiens
aactctggctggggcagtgc

SEQ ID NO: 497 - DNA, 18 bp, Homo sapiens
aactcttccccgctgaga

SEQ ID NO: 498 - DNA, 20 bp, Homo sapiens
aactgagaggaactgagacc

SEQ ID NO: 499 - DNA, 18 bp, Homo sapiens
aactgagcgagggggcca

SEQ ID NO: 500 - DNA, 17 bp, Homo sapiens
aactgatccgcggcggc

SEQ ID NO: 501 - DNA, 17 bp, Homo sapiens
aactgcaattttagccg

SEQ ID NO: 502 - DNA, 20 bp, Homo sapiens
aactgcagccgcacgtgggc

SEQ ID NO: 503 - DNA, 21 bp, Homo sapiens
aactgcaggcagcgaggctcg

SEQ ID NO: 504 - DNA, 18 bp, Homo sapiens
aactgcgagagtcggggt

SEQ ID NO: 505 - DNA, 19 bp, Homo sapiens
aactgcgagagtcggggtc

SEQ ID NO: 506 - DNA, 19 bp, Homo sapiens
aactggagcacggagctgc

SEQ ID NO: 507 - DNA, 19 bp, Homo sapiens
aactggagccgctgtagcc

SEQ ID NO: 508 - DNA, 17 bp, Homo sapiens
gaagatggcggtggctg

SEQ ID NO: 509 - DNA, 16 bp, Homo sapiens
gaagatggcgtaccag

SEQ ID NO: 510 - DNA, 18 bp, Homo sapiens
gaagatggtggaggacgg

SEQ ID NO: 511 - DNA, 18 bp, Homo sapiens
gaagattgtgcatgccgt

SEQ ID NO: 512 - DNA, 19 bp, Homo sapiens
gaagcagaggtggtagcca

SEQ ID NO: 513 - DNA, 17 bp, Homo sapiens
gaagcagagtctggggg

SEQ ID NO: 514 - DNA, 18 bp, Homo sapiens
gaagcagcgaggcgggag

SEQ ID NO: 515 - DNA, 18 bp, Homo sapiens
gaagcaggctgtgagggg

SEQ ID NO: 516 - DNA, 19 bp, Homo sapiens
gaagcaggctgtgaggggc

SEQ ID NO: 517 - DNA, 19 bp, Homo sapiens
gaagccaagactgagccgg

SEQ ID NO: 518 - DNA, 19 bp, Homo sapiens
gaagccagaaacagacctg

SEQ ID NO: 519 - DNA, 18 bp, Homo sapiens
gaagcccggtataaaaaa

SEQ ID NO: 520 - DNA, 23 bp, Homo sapiens
gaagccggtagaaatgagacaga

SEQ ID NO: 521 - DNA, 20 bp, Homo sapiens
gaagccggtgctgctgggcc

SEQ ID NO: 522 - DNA, 18 bp, Homo sapiens
gaagccgtgcggagcgag

SEQ ID NO: 523 - DNA, 19 bp, Homo sapiens
gaagccgtggccagctcga

SEQ ID NO: 524 - DNA, 16 bp, Homo sapiens
gaagcctgggaaggac

SEQ ID NO: 525 - DNA, 18 bp, Homo sapiens
gaagccttgagaggtctg

SEQ ID NO: 526 - DNA, 19 bp, Homo sapiens
gaagcgaaggaggagtgtg

SEQ ID NO: 527 - DNA, 18 bp, Homo sapiens
gaagcgaatgggttgggg

SEQ ID NO: 528 - DNA, 20 bp, Homo sapiens
gaagcgccatggcactgcag

SEQ ID NO: 529 - DNA, 18 bp, Homo sapiens
gaagcgcgatcccaggac

SEQ ID NO: 530 - DNA, 18 bp, Homo sapiens
gaagcggaagtcgggggg

SEQ ID NO: 531 - DNA, 18 bp, Homo sapiens
gaagcggaataatggttt

SEQ ID NO: 532 - DNA, 18 bp, Homo sapiens
gaagcggaggcagagcgg

SEQ ID NO: 533 - DNA, 21 bp, Homo sapiens
gaagcggagggcgcgggaccc

SEQ ID NO: 534 - DNA, 16 bp, Homo sapiens
gaagcggagtgagtga

SEQ ID NO: 535 - DNA, 17 bp, Homo sapiens
gaagcggagtgagtgac

SEQ ID NO: 536 - DNA, 17 bp, Homo sapiens
gaagcgggggtgcagcg

SEQ ID NO: 537 - DNA, 19 bp, Homo sapiens
gaagcgggtcccgcaggtc

SEQ ID NO: 538 - DNA, 18 bp, Homo sapiens
gaagcggtggctgggctg

SEQ ID NO: 539 - DNA, 18 bp, Homo sapiens
gaagcgtcatacggaccg

SEQ ID NO: 540 - DNA, 21 bp, Homo sapiens
gaagcgtcggactaccgttgg

SEQ ID NO: 541 - DNA, 17 bp, Homo sapiens
gaagcgttacttgaggc

SEQ ID NO: 542 - DNA, 18 bp, Homo sapiens
gaagctacagctacctcc

SEQ ID NO: 543 - DNA, 22 bp, Homo sapiens
gaagctacccgcggggttgtag

SEQ ID NO: 544 - DNA, 17 bp, Homo sapiens
gaagctagtagcggagc

SEQ ID NO: 545 - DNA, 18 bp, Homo sapiens
gaagctcagtgggctacg

SEQ ID NO: 546 - DNA, 18 bp, Homo sapiens
gaagctgcaatgaatcct

SEQ ID NO: 547 - DNA, 21 bp, Homo sapiens
gaaggaagatggcggacggcg

SEQ ID NO: 548 - DNA, 18 bp, Homo sapiens
gaaggacagcagagacaa

SEQ ID NO: 549 - DNA, 21 bp, Homo sapiens
gaaggaccaaaggcgaccggt

SEQ ID NO: 550 - DNA, 20 bp, Homo sapiens
gaaggaccagcagaaagatg

SEQ ID NO: 551 - DNA, 19 bp, Homo sapiens
gaaggaccggtgtgctagg

SEQ ID NO: 552 - DNA, 20 bp, Homo sapiens
gaaggaggaggaggaggacg

SEQ ID NO: 553 - DNA, 22 bp, Homo sapiens
gaaggagggagggagcgagtac

SEQ ID NO: 554 - DNA, 17 bp, Homo sapiens
gaaggatcgcaggcgag

SEQ ID NO: 555 - DNA, 20 bp, Homo sapiens
gaaggcaacggcagcgggat

SEQ ID NO: 556 - DNA, 18 bp, Homo sapiens
gaaggcacgcggaacctc

SEQ ID NO: 557 - DNA, 23 bp, Homo sapiens
gaaggccagaaactcgctcgcca

SEQ ID NO: 558 - DNA, 18 bp, Homo sapiens
gaaggcccggaggcgaag

SEQ ID NO: 559 - DNA, 18 bp, Homo sapiens
gaaggcgtgacgtggggt

SEQ ID NO: 560 - DNA, 20 bp, Homo sapiens
gaagggaaaaggggaaacgg

SEQ ID NO: 561 - DNA, 18 bp, Homo sapiens
gaaggggtggtgtagggc

SEQ ID NO: 562 - DNA, 18 bp, Homo sapiens
gaagggtgagtctggacg

SEQ ID NO: 563 - DNA, 17 bp, Homo sapiens
gaagggtgatacggaga

SEQ ID NO: 564 - DNA, 18 bp, Homo sapiens
gaagggtgatacggagaa

SEQ ID NO: 565 - DNA, 18 bp, Homo sapiens
aactgggctggaccgaaa

SEQ ID NO: 566 - DNA, 19 bp, Homo sapiens
aactggtgggatctgcggc

SEQ ID NO: 567 - DNA, 17 bp, Homo sapiens
aactgtaggacaaggcc

SEQ ID NO: 568 - DNA, 15 bp, Homo sapiens
aactgtgcgaaccag

SEQ ID NO: 569 - DNA, 21 bp, Homo sapiens
aactgtggggcccgcggcgcg

SEQ ID NO: 570 - DNA, 20 bp, Homo sapiens
aacttaacggctaatgtgga

SEQ ID NO: 571 - DNA, 18 bp, Homo sapiens
aacttccagaattatggc

SEQ ID NO: 572 - DNA, 18 bp, Homo sapiens
aacttccatgcgaccgcc

SEQ ID NO: 573 - DNA, 18 bp, Homo sapiens
aacttggacgctgcagag

SEQ ID NO: 574 - DNA, 21 bp, Homo sapiens
aacttggacgctgcagagtga

SEQ ID NO: 575 - DNA, 19 bp, Homo sapiens
aacttggtgctgacggaag

SEQ ID NO: 576 - DNA, 23 bp, Homo sapiens
aactttcacttttcttttctcca

SEQ ID NO: 577 - DNA, 17 bp, Homo sapiens
aactttggggttcggca

SEQ ID NO: 578 - DNA, 18 bp, Homo sapiens
aagaaactgtaggcaatg

SEQ ID NO: 579 - DNA, 17 bp, Homo sapiens
aagaaagatggcctccg

SEQ ID NO: 580 - DNA, 21 bp, Homo sapiens
aagaaagccccagcgctctag

SEQ ID NO: 581 - DNA, 18 bp, Homo sapiens
aagaaagcctcagaacgt

SEQ ID NO: 582 - DNA, 18 bp, Homo sapiens
aagaaatgtggtcgcggt

SEQ ID NO: 583 - DNA, 21 bp, Homo sapiens
aagaagagagaggcaagggca

SEQ ID NO: 584 - DNA, 22 bp, Homo sapiens
aagaagaggtagcgagtggacg

SEQ ID NO: 585 - DNA, 18 bp, Homo sapiens
aagaagatggcgctcacc

SEQ ID NO: 586 - DNA, 17 bp, Homo sapiens
aagaaggacgggaagaa

SEQ ID NO: 587 - DNA, 18 bp, Homo sapiens
aagaaggacgggaagaag

SEQ ID NO: 588 - DNA, 17 bp, Homo sapiens
aagaaggctcttacagc

SEQ ID NO: 589 - DNA, 16 bp, Homo sapiens
aagaagtcatggcggc

SEQ ID NO: 590 - DNA, 20 bp, Homo sapiens
aagaagttggcgtgcagctg

SEQ ID NO: 591 - DNA, 18 bp, Homo sapiens
aagaattagtcggaactc

SEQ ID NO: 592 - DNA, 16 bp, Homo sapiens
aagaatttccgagtca

SEQ ID NO: 593 - DNA, 23 bp, Homo sapiens
aagacccaggctgcgggacgcgg

SEQ ID NO: 594 - DNA, 18 bp, Homo sapiens
aagactcagagctacggc

SEQ ID NO: 595 - DNA, 20 bp, Homo sapiens
aagactcagagctacggcca

SEQ ID NO: 596 - DNA, 17 bp, Homo sapiens
aagactgagccggcggc

SEQ ID NO: 597 - DNA, 18 bp, Homo sapiens
aagactgccgggcgcatg

SEQ ID NO: 598 - DNA, 18 bp, Homo sapiens
aagactgcgaggtggccg

SEQ ID NO: 599 - DNA, 16 bp, Homo sapiens
aagactggcgaaagtg

SEQ ID NO: 600 - DNA, 22 bp, Homo sapiens
aagagaaaggcagagagagtcg

SEQ ID NO: 601 - DNA, 20 bp, Homo sapiens
aagagaaccggtcgcggcaa

SEQ ID NO: 602 - DNA, 18 bp, Homo sapiens
aagagagaggcaagggca

SEQ ID NO: 603 - DNA, 18 bp, Homo sapiens
aagagagggatagtcgga

SEQ ID NO: 604 - DNA, 16 bp, Homo sapiens
aagagcggaagaaacg

SEQ ID NO: 605 - DNA, 18 bp, Homo sapiens
aagagcgggacagggaca

SEQ ID NO: 606 - DNA, 20 bp, Homo sapiens
aagaggcagctgcagtggag

SEQ ID NO: 607 - DNA, 18 bp, Homo sapiens
aagaggcggagaacaata

SEQ ID NO: 608 - DNA, 22 bp, Homo sapiens
aagaggcggaggtggaggcgac

SEQ ID NO: 609 - DNA, 23 bp, Homo sapiens
aagaggctcactggggaagactg

SEQ ID NO: 610 - DNA, 19 bp, Homo sapiens
aagagggcaaagaagctga

SEQ ID NO: 611 - DNA, 19 bp, Homo sapiens
aagaggtagcgagtggacg

SEQ ID NO: 612 - DNA, 19 bp, Homo sapiens
aagatggaggcgctgagtc

SEQ ID NO: 613 - DNA, 18 bp, Homo sapiens
aagatggcgcggagcggg

SEQ ID NO: 614 - DNA, 22 bp, Homo sapiens
aagatggcggacagtgcggaac

SEQ ID NO: 615 - DNA, 17 bp, Homo sapiens
aagatggcggaccttga

SEQ ID NO: 616 - DNA, 17 bp, Homo sapiens
aagatggcggacgaggc

SEQ ID NO: 617 - DNA, 23 bp, Homo sapiens
aagatggcggacgaggcggccct

SEQ ID NO: 618 - DNA, 18 bp, Homo sapiens
aagatggcggagtagcaa

SEQ ID NO: 619 - DNA, 18 bp, Homo sapiens
aagatggcggccgccgag

SEQ ID NO: 620 - DNA, 18 bp, Homo sapiens
aagatggcggcctgaacg

SEQ ID NO: 621 - DNA, 19 bp, Homo sapiens
aagatggcggcctgaacgc

SEQ ID NO: 622 - DNA, 20 bp, Homo sapiens
gaagggtgctgagatgtggg

SEQ ID NO: 623 - DNA, 17 bp, Homo sapiens
gaagggtttgcggcggc

SEQ ID NO: 624 - DNA, 17 bp, Homo sapiens
gaaggtacactataggc

SEQ ID NO: 625 - DNA, 19 bp, Homo sapiens
gaaggtacgtctgtttctg

SEQ ID NO: 626 - DNA, 20 bp, Homo sapiens
gaaggtaggatgagaaggca

SEQ ID NO: 627 - DNA, 18 bp, Homo sapiens
gaaggtccccgcgactcc

SEQ ID NO: 628 - DNA, 20 bp, Homo sapiens
gaaggtgaagatggctgcct

SEQ ID NO: 629 - DNA, 19 bp, Homo sapiens
gaaggtgagcctctgggga

SEQ ID NO: 630 - DNA, 18 bp, Homo sapiens
gaaggtgctgcacagctg

SEQ ID NO: 631 - DNA, 17 bp, Homo sapiens
gaaggtggcggcggctc

SEQ ID NO: 632 - DNA, 18 bp, Homo sapiens
gaaggtggttgtcgtccg

SEQ ID NO: 633 - DNA, 20 bp, Homo sapiens
gaaggtgtggaggtaagcga

SEQ ID NO: 634 - DNA, 18 bp, Homo sapiens
gaaggtgtgtgttggtga

SEQ ID NO: 635 - DNA, 23 bp, Homo sapiens
gaagtacagtagtaagagtaaca

SEQ ID NO: 636 - DNA, 18 bp, Homo sapiens
gaagtaccgcgagcaagg

SEQ ID NO: 637 - DNA, 18 bp, Homo sapiens
gaagtacgagcggatccg

SEQ ID NO: 638 - DNA, 18 bp, Homo sapiens
gaagtaggaacgagaagc

SEQ ID NO: 639 - DNA, 17 bp, Homo sapiens
gaagtcatgtctggacg

SEQ ID NO: 640 - DNA, 17 bp, Homo sapiens
gaagtccctggctaagc

SEQ ID NO: 641 - DNA, 18 bp, Homo sapiens
gaagtcgctgcgaggagg

SEQ ID NO: 642 - DNA, 18 bp, Homo sapiens
gaagtcgcttgtgtatga

SEQ ID NO: 643 - DNA, 18 bp, Homo sapiens
gaagtcggctaggtttgc

SEQ ID NO: 644 - DNA, 20 bp, Homo sapiens
gaagtctccgggggagtcgc

SEQ ID NO: 645 - DNA, 18 bp, Homo sapiens
gaagtgaccctagagaaa

SEQ ID NO: 646 - DNA, 18 bp, Homo sapiens
gaagtgagagtcggggat

SEQ ID NO: 647 - DNA, 18 bp, Homo sapiens
gaagtgaggtcgacagac

SEQ ID NO: 648 - DNA, 17 bp, Homo sapiens
gaagtgccgaatgggga

SEQ ID NO: 649 - DNA, 18 bp, Homo sapiens
gaagtggcctaaaacttc

SEQ ID NO: 650 - DNA, 18 bp, Homo sapiens
gaagtgtctgggctggga

SEQ ID NO: 651 - DNA, 24 bp, Homo sapiens
gaagtgtggcttcgtttacagttc

SEQ ID NO: 652 - DNA, 18 bp, Homo sapiens
gaagtgtggtggcctgag

SEQ ID NO: 653 - DNA, 19 bp, Homo sapiens
gaagtgttgggggaacggc

SEQ ID NO: 654 - DNA, 17 bp, Homo sapiens
gaagttgggaagcgagc

SEQ ID NO: 655 - DNA, 17 bp, Homo sapiens
gaagtttcctcagtgac

SEQ ID NO: 656 - DNA, 18 bp, Homo sapiens
gaagtttggcggaacatg

SEQ ID NO: 657 - DNA, 22 bp, Homo sapiens
gaatacgcctctgacgcttcac

SEQ ID NO: 658 - DNA, 22 bp, Homo sapiens
gaatcccgttcgggcagcggcc

SEQ ID NO: 659 - DNA, 17 bp, Homo sapiens
gaatcgcgggtcgcgga

SEQ ID NO: 660 - DNA, 20 bp, Homo sapiens
gaatcgcgggtcgcggacgc

SEQ ID NO: 661 - DNA, 21 bp, Homo sapiens
gaatcttccccaccaaagtca

SEQ ID NO: 662 - DNA, 17 bp, Homo sapiens
gaatgtgaggcggagcg

SEQ ID NO: 663 - DNA, 18 bp, Homo sapiens
gaatgtgaggcggagcgg

SEQ ID NO: 664 - DNA, 20 bp, Homo sapiens
gaattagtccgagtggagag

SEQ ID NO: 665 - DNA, 17 bp, Homo sapiens
gaattatggcgaagtcc

SEQ ID NO: 666 - DNA, 18 bp, Homo sapiens
gaattcggtgcggatggc

SEQ ID NO: 667 - DNA, 18 bp, Homo sapiens
gaattctgctggcgctgc

SEQ ID NO: 668 - DNA, 18 bp, Homo sapiens
gaattgcaacggcagctg

SEQ ID NO: 669 - DNA, 17 bp, Homo sapiens
gaattgcaggacacatt

SEQ ID NO: 670 - DNA, 18 bp, Homo sapiens
gaattggacttgggaggc

SEQ ID NO: 671 - DNA, 18 bp, Homo sapiens
gaatttctcaaggactgc

SEQ ID NO: 672 - DNA, 18 bp, Homo sapiens
gacaaacggaagtgtagg

SEQ ID NO: 673 - DNA, 22 bp, Homo sapiens
gacaaagatggcggcagggacc

SEQ ID NO: 674 - DNA, 19 bp, Homo sapiens
gacaacatggcggccttca

SEQ ID NO: 675 - DNA, 16 bp, Homo sapiens
gacaagcccaaccgga

SEQ ID NO: 676 - DNA, 18 bp, Homo sapiens
gacacaacaaagatggcg

SEQ ID NO: 677 - DNA, 19 bp, Homo sapiens
gacacaaccagctgactcc

SEQ ID NO: 678 - DNA, 20 bp, Homo sapiens
gacacaggattcatgcggta

SEQ ID NO: 679 - DNA, 23 bp, Homo sapiens
aagatggcggcctgaacgcagct

SEQ ID NO: 680 - DNA, 21 bp, Homo sapiens
aagatggcggcgcccagaggc

SEQ ID NO: 681 - DNA, 20 bp, Homo sapiens
aagatggcggcgctgaagga

SEQ ID NO: 682 - DNA, 17 bp, Homo sapiens
aagatggcggcggtttt

SEQ ID NO: 683 - DNA, 17 bp, Homo sapiens
aagatggcggcgtgtgg

SEQ ID NO: 684 - DNA, 18 bp, Homo sapiens
aagatggcggggaacgac

SEQ ID NO: 685 - DNA, 16 bp, Homo sapiens
aagatggcgtccctgg

SEQ ID NO: 686 - DNA, 19 bp, Homo sapiens
aagatggtaggagaatgag

SEQ ID NO: 687 - DNA, 18 bp, Homo sapiens
aagatggtgagtgagctg

SEQ ID NO: 688 - DNA, 19 bp, Homo sapiens
aagatggtgctggatctgg

SEQ ID NO: 689 - DNA, 18 bp, Homo sapiens
aagcaagtctggtctctg

SEQ ID NO: 690 - DNA, 19 bp, Homo sapiens
aagcaagtctggtctctgt

SEQ ID NO: 691 - DNA, 22 bp, Homo sapiens
aagcaagtctggtctctgtgat

SEQ ID NO: 692 - DNA, 22 bp, Homo sapiens
aagcaatcctgagaggtcggga

SEQ ID NO: 693 - DNA, 21 bp, Homo sapiens
aagcacacaggaaaaggagct

SEQ ID NO: 694 - DNA, 18 bp, Homo sapiens
aagcacgctgaaaccctg

SEQ ID NO: 695 - DNA, 16 bp, Homo sapiens
aagcacgggactggag

SEQ ID NO: 696 - DNA, 18 bp, Homo sapiens
aagcacgggactggaggg

SEQ ID NO: 697 - DNA, 18 bp, Homo sapiens
aagcactatggtgtggtg

SEQ ID NO: 698 - DNA, 21 bp, Homo sapiens
aagcagagcacctcagaactc

SEQ ID NO: 699 - DNA, 18 bp, Homo sapiens
aagcagcgggttagtggt

SEQ ID NO: 700 - DNA, 20 bp, Homo sapiens
aagcagcgggttagtggtcg

SEQ ID NO: 701 - DNA, 24 bp, Homo sapiens
aagcagcgggttagtggtcgcgcg

SEQ ID NO: 702 - DNA, 17 bp, Homo sapiens
aagcaggaagtgaactg

SEQ ID NO: 703 - DNA, 18 bp, Homo sapiens
aagcaggtagtggcgctg

SEQ ID NO: 704 - DNA, 20 bp, Homo sapiens
aagcatcgcggagagaagga

SEQ ID NO: 705 - DNA, 16 bp, Homo sapiens
aagcatggtaggactt

SEQ ID NO: 706 - DNA, 17 bp, Homo sapiens
aagcatggtaggacttg

SEQ ID NO: 707 - DNA, 18 bp, Homo sapiens
aagcatggtaggacttgc

SEQ ID NO: 708 - DNA, 20 bp, Homo sapiens
aagcatggtaggacttgctg

SEQ ID NO: 709 - DNA, 18 bp, Homo sapiens
aagccaacaggctagtgg

SEQ ID NO: 710 - DNA, 17 bp, Homo sapiens
aagccaagactgagccg

SEQ ID NO: 711 - DNA, 18 bp, Homo sapiens
aagccaagactgagccgg

SEQ ID NO: 712 - DNA, 19 bp, Homo sapiens
aagccaagactgagccggc

SEQ ID NO: 713 - DNA, 24 bp, Homo sapiens
aagccaagactgagccggcggccg

SEQ ID NO: 714 - DNA, 18 bp, Homo sapiens
aagccaagagccgacctt

SEQ ID NO: 715 - DNA, 17 bp, Homo sapiens
aagccagaggccgcggc

SEQ ID NO: 716 - DNA, 16 bp, Homo sapiens
aagccagggtgcgcta

SEQ ID NO: 717 - DNA, 18 bp, Homo sapiens
aagccatgtcggactcgg

SEQ ID NO: 718 - DNA, 21 bp, Homo sapiens
aagccccggaggaccggcctg

SEQ ID NO: 719 - DNA, 19 bp, Homo sapiens
aagcccgcagcaaacacat

SEQ ID NO: 720 - DNA, 17 bp, Homo sapiens
aagcccggcggggaccg

SEQ ID NO: 721 - DNA, 18 bp, Homo sapiens
aagcccggggacttggtg

SEQ ID NO: 722 - DNA, 19 bp, Homo sapiens
aagccgaggcgagagagac

SEQ ID NO: 723 - DNA, 17 bp, Homo sapiens
aagccgcgccagaactg

SEQ ID NO: 724 - DNA, 18 bp, Homo sapiens
aagccggagacagcaggg

SEQ ID NO: 725 - DNA, 19 bp, Homo sapiens
aagccggagacagcagggt

SEQ ID NO: 726 - DNA, 18 bp, Homo sapiens
aagccgggactggaccga

SEQ ID NO: 727 - DNA, 18 bp, Homo sapiens
aagccgggagtccggtga

SEQ ID NO: 728 - DNA, 19 bp, Homo sapiens
aagccgggccccgaggctc

SEQ ID NO: 729 - DNA, 20 bp, Homo sapiens
aagccgggcggaggagagct

SEQ ID NO: 730 - DNA, 20 bp, Homo sapiens
aagcctcattcattcattcc

SEQ ID NO: 731 - DNA, 21 bp, Homo sapiens
aagcctctcggtctgtggcag

SEQ ID NO: 732 - DNA, 22 bp, Homo sapiens
aagcctctcggtctgtggcagc

SEQ ID NO: 733 - DNA, 22 bp, Homo sapiens
aagcctggaggaggagcttgag

SEQ ID NO: 734 - DNA, 18 bp, Homo sapiens
aagcgaagaaggaaggtg

SEQ ID NO: 735 - DNA, 17 bp, Homo sapiens
aagcgaatgggttgggg

SEQ ID NO: 736 - DNA, 23 bp, Homo sapiens
gacacctacgacgatcgggccta

SEQ ID NO: 737 - DNA, 17 bp, Homo sapiens
gacacgccttagcgcca

SEQ ID NO: 738 - DNA, 21 bp, Homo sapiens
gacacttcgaacgcacttgcg

SEQ ID NO: 739 - DNA, 20 bp, Homo sapiens
gacagaccggacacagaggg

SEQ ID NO: 740 - DNA, 19 bp, Homo sapiens
gacagacggtaagctgggg

SEQ ID NO: 741 - DNA, 18 bp, Homo sapiens
gacagactgacgtgtgag

SEQ ID NO: 742 - DNA, 18 bp, Homo sapiens
gacagactgcgggacgga

SEQ ID NO: 743 - DNA, 21 bp, Homo sapiens
gacagagatggcactgatgca

SEQ ID NO: 744 - DNA, 18 bp, Homo sapiens
gacagagcccgctcctcc

SEQ ID NO: 745 - DNA, 16 bp, Homo sapiens
gacagattctcggtgg

SEQ ID NO: 746 - DNA, 18 bp, Homo sapiens
gacagcagccatttcgga

SEQ ID NO: 747 - DNA, 18 bp, Homo sapiens
gacagcattcgggccgag

SEQ ID NO: 748 - DNA, 21 bp, Homo sapiens
gacagcattcgggccgagatg

SEQ ID NO: 749 - DNA, 18 bp, Homo sapiens
gacagccagccgggcccg

SEQ ID NO: 750 - DNA, 18 bp, Homo sapiens
gacagcctgactgcgcgg

SEQ ID NO: 751 - DNA, 19 bp, Homo sapiens
gacagccttggcccggccg

SEQ ID NO: 752 - DNA, 18 bp, Homo sapiens
gacagcgcagtttgaatc

SEQ ID NO: 753 - DNA, 18 bp, Homo sapiens
gacagcgggagcgtgggg

SEQ ID NO: 754 - DNA, 18 bp, Homo sapiens
gacagcggggtggacaag

SEQ ID NO: 755 - DNA, 17 bp, Homo sapiens
gacagcggtctaggaat

SEQ ID NO: 756 - DNA, 15 bp, Homo sapiens
gacagcgttcggtgc

SEQ ID NO: 757 - DNA, 19 bp, Homo sapiens
gacagctggagacagtggt

SEQ ID NO: 758 - DNA, 18 bp, Homo sapiens
gacaggaaagggacggag

SEQ ID NO: 759 - DNA, 17 bp, Homo sapiens
gacaggacaatggcggc

SEQ ID NO: 760 - DNA, 18 bp, Homo sapiens
gacaggagagcctgggca

SEQ ID NO: 761 - DNA, 19 bp, Homo sapiens
gacaggcagacggacaggc

SEQ ID NO: 762 - DNA, 20 bp, Homo sapiens
gacagggctgtgtaggggcg

SEQ ID NO: 763 - DNA, 20 bp, Homo sapiens
gacaggtccagcggttgttc

SEQ ID NO: 764 - DNA, 18 bp, Homo sapiens
gacagtatctgtgggtac

SEQ ID NO: 765 - DNA, 21 bp, Homo sapiens
gacagtgcaggacgagaaacg

SEQ ID NO: 766 - DNA, 17 bp, Homo sapiens
gacagttgggtaaggat

SEQ ID NO: 767 - DNA, 18 bp, Homo sapiens
gacagtttcgacactttg

SEQ ID NO: 768 - DNA, 19 bp, Homo sapiens
gacatctgacctcggcact

SEQ ID NO: 769 - DNA, 21 bp, Homo sapiens
gacatggaggatgatttcatg

SEQ ID NO: 770 - DNA, 16 bp, Homo sapiens
gacattgccggcgtct

SEQ ID NO: 771 - DNA, 17 bp, Homo sapiens
gaccaaagcgcagaaga

SEQ ID NO: 772 - DNA, 18 bp, Homo sapiens
gaccaacaaagcccagcc

SEQ ID NO: 773 - DNA, 20 bp, Homo sapiens
gaccacacatgctcttcctg

SEQ ID NO: 774 - DNA, 18 bp, Homo sapiens
gaccacaggctcagaggc

SEQ ID NO: 775 - DNA, 17 bp, Homo sapiens
gaccacggaccaggcag

SEQ ID NO: 776 - DNA, 16 bp, Homo sapiens
gaccactgagacgagc

SEQ ID NO: 777 - DNA, 17 bp, Homo sapiens
gaccagccggccggcgg

SEQ ID NO: 778 - DNA, 18 bp, Homo sapiens
gaccagttggcgacatgg

SEQ ID NO: 779 - DNA, 21 bp, Homo sapiens
gacccagggggccgccggagg

SEQ ID NO: 780 - DNA, 18 bp, Homo sapiens
gaccccaggctgcggccg

SEQ ID NO: 781 - DNA, 22 bp, Homo sapiens
gaccccgctgcacagtccggcc

SEQ ID NO: 782 - DNA, 23 bp, Homo sapiens
gaccccggcaacgggggcggaca

SEQ ID NO: 783 - DNA, 17 bp, Homo sapiens
gacccctgggaggtcgg

SEQ ID NO: 784 - DNA, 19 bp, Homo sapiens
gacccgacgcccggggtcc

SEQ ID NO: 785 - DNA, 24 bp, Homo sapiens
gacccggaaggtcttcccgccaca

SEQ ID NO: 786 - DNA, 19 bp, Homo sapiens
gacccggcactcgcctgga

SEQ ID NO: 787 - DNA, 17 bp, Homo sapiens
gacccggctgacagtcc

SEQ ID NO: 788 - DNA, 19 bp, Homo sapiens
gacccgggatcagagtgtg

SEQ ID NO: 789 - DNA, 21 bp, Homo sapiens
gacccgggtgagaggttcccg

SEQ ID NO: 790 - DNA, 23 bp, Homo sapiens
gaccctagtccaacatggcggcg

SEQ ID NO: 791 - DNA, 17 bp, Homo sapiens
gaccctctggcacctct

SEQ ID NO: 792 - DNA, 22 bp, Homo sapiens
gaccctgtaagtggctgcggcg

SEQ ID NO: 793 - DNA, 18 bp, Homo sapiens
aagcgaggagtccgagtg

SEQ ID NO: 794 - DNA, 20 bp, Homo sapiens
aagcgaggagtccgagtgtg

SEQ ID NO: 795 - DNA, 16 bp, Homo sapiens
aagcgagggctcggga

SEQ ID NO: 796 - DNA, 17 bp, Homo sapiens
aagcgagttgcgacacg

SEQ ID NO: 797 - DNA, 18 bp, Homo sapiens
aagcgatggctgggcccg

SEQ ID NO: 798 - DNA, 18 bp, Homo sapiens
aagcgcagcggaactcga

SEQ ID NO: 799 - DNA, 22 bp, Homo sapiens
aagcgccccggcggagctggcc

SEQ ID NO: 800 - DNA, 18 bp, Homo sapiens
aagcgccgagagcgcggc

SEQ ID NO: 801 - DNA, 17 bp, Homo sapiens
aagcgcctgaggaccgg

SEQ ID NO: 802 - DNA, 18 bp, Homo sapiens
aagcgctcggggactctg

SEQ ID NO: 803 - DNA, 19 bp, Homo sapiens
aagcgctggcctgacgtca

SEQ ID NO: 804 - DNA, 18 bp, Homo sapiens
aagcgcttcagtagcgag

SEQ ID NO: 805 - DNA, 19 bp, Homo sapiens
aagcgcttcagtagcgaga

SEQ ID NO: 806 - DNA, 21 bp, Homo sapiens
aagcgcttggtattgagtctg

SEQ ID NO: 807 - DNA, 17 bp, Homo sapiens
aagcggaatgagatgga

SEQ ID NO: 808 - DNA, 17 bp, Homo sapiens
aagcggagagcggctga

SEQ ID NO: 809 - DNA, 17 bp, Homo sapiens
aagcggaggcagagcgg

SEQ ID NO: 810 - DNA, 18 bp, Homo sapiens
aagcggagtgttggtgag

SEQ ID NO: 811 - DNA, 17 bp, Homo sapiens
aagcggatcagagaggg

SEQ ID NO: 812 - DNA, 18 bp, Homo sapiens
aagcggatgagggaaggg

SEQ ID NO: 813 - DNA, 19 bp, Homo sapiens
aagcggcccagatatgtta

SEQ ID NO: 814 - DNA, 18 bp, Homo sapiens
aagcggggaaaggtagag

SEQ ID NO: 815 - DNA, 17 bp, Homo sapiens
aagcggtcggtcgagtg

SEQ ID NO: 816 - DNA, 17 bp, Homo sapiens
aagcggtggctgggctg

SEQ ID NO: 817 - DNA, 17 bp, Homo sapiens
aagcgtcggactaccgt

SEQ ID NO: 818 - DNA, 18 bp, Homo sapiens
aagcgtcggactaccgtt

SEQ ID NO: 819 - DNA, 18 bp, Homo sapiens
aagcgtgaggggacagat

SEQ ID NO: 820 - DNA, 18 bp, Homo sapiens
aagctaagaacgaggctg

SEQ ID NO: 821 - DNA, 18 bp, Homo sapiens
aagctagtgcgctgtaac

SEQ ID NO: 822 - DNA, 18 bp, Homo sapiens
aagctcagctgatgcagg

SEQ ID NO: 823 - DNA, 20 bp, Homo sapiens
aagctccagagacacgagcg

SEQ ID NO: 824 - DNA, 18 bp, Homo sapiens
aagctccgcgcaagcagc

SEQ ID NO: 825 - DNA, 18 bp, Homo sapiens
aagctcgggccggcaggg

SEQ ID NO: 826 - DNA, 23 bp, Homo sapiens
aagctgacagcattcgggccgag

SEQ ID NO: 827 - DNA, 20 bp, Homo sapiens
aagctgctggtcttgggata

SEQ ID NO: 828 - DNA, 19 bp, Homo sapiens
aagctgttggaggtagtgg

SEQ ID NO: 829 - DNA, 18 bp, Homo sapiens
aagcttgagtcggggggc

SEQ ID NO: 830 - DNA, 18 bp, Homo sapiens
aagcttgggctttgcacc

SEQ ID NO: 831 - DNA, 19 bp, Homo sapiens
aagcttgggctttgcaccc

SEQ ID NO: 832 - DNA, 20 bp, Homo sapiens
aagcttgggctttgcacccg

SEQ ID NO: 833 - DNA, 19 bp, Homo sapiens
aaggaacgccggctcttcg

SEQ ID NO: 834 - DNA, 19 bp, Homo sapiens
aaggaacggtttggggcag

SEQ ID NO: 835 - DNA, 18 bp, Homo sapiens
aaggaactgggagcgcgc

SEQ ID NO: 836 - DNA, 18 bp, Homo sapiens
aaggaagggccggaggcg

SEQ ID NO: 837 - DNA, 20 bp, Homo sapiens
aaggaagtgcttttgaatga

SEQ ID NO: 838 - DNA, 20 bp, Homo sapiens
aaggacagcagagacaacag

SEQ ID NO: 839 - DNA, 19 bp, Homo sapiens
aaggacagggaaggtaagg

SEQ ID NO: 840 - DNA, 17 bp, Homo sapiens
aaggacgagccggggcg

SEQ ID NO: 841 - DNA, 16 bp, Homo sapiens
aaggacggaggcacgg

SEQ ID NO: 842 - DNA, 20 bp, Homo sapiens
aaggactgaggctacggtcc

SEQ ID NO: 843 - DNA, 17 bp, Homo sapiens
aaggagacctgcttccg

SEQ ID NO: 844 - DNA, 19 bp, Homo sapiens
aaggagagaaaatggcggc

SEQ ID NO: 845 - DNA, 18 bp, Homo sapiens
aaggagcaaactctgcac

SEQ ID NO: 846 - DNA, 18 bp, Homo sapiens
aaggaggacgcggcgcgc

SEQ ID NO: 847 - DNA, 19 bp, Homo sapiens
aaggaggacgcggcgcgcg

SEQ ID NO: 848 - DNA, 21 bp, Homo sapiens
aaggaggagggcgctccaggc

SEQ ID NO: 849 - DNA, 23 bp, Homo sapiens
aaggaggcagggaagaaacccac

SEQ ID NO: 850 - DNA, 18 bp, Homo sapiens
gacccttgggagagggag

SEQ ID NO: 851 - DNA, 21 bp, Homo sapiens
gaccgaggacagaaagattgg

SEQ ID NO: 852 - DNA, 18 bp, Homo sapiens
gaccgaggggcggacgcg

SEQ ID NO: 853 - DNA, 20 bp, Homo sapiens
gaccgccaagatggtggtgg

SEQ ID NO: 854 - DNA, 19 bp, Homo sapiens
gaccgccgcgagtccgcag

SEQ ID NO: 855 - DNA, 19 bp, Homo sapiens
gaccgcggggtagtcggcg

SEQ ID NO: 856 - DNA, 20 bp, Homo sapiens
gaccggagaagctgtgaggt

SEQ ID NO: 857 - DNA, 16 bp, Homo sapiens
gaccggaggcggcggc

SEQ ID NO: 858 - DNA, 18 bp, Homo sapiens
gaccggctgaggcggcgc

SEQ ID NO: 859 - DNA, 18 bp, Homo sapiens
gaccgggagccggacccc

SEQ ID NO: 860 - DNA, 18 bp, Homo sapiens
gaccggggtgttgggtgc

SEQ ID NO: 861 - DNA, 19 bp, Homo sapiens
gaccggtgtctggcggatg

SEQ ID NO: 862 - DNA, 18 bp, Homo sapiens
gacctaccgaccattctt

SEQ ID NO: 863 - DNA, 18 bp, Homo sapiens
gacctaggtcgcggcgac

SEQ ID NO: 864 - DNA, 21 bp, Homo sapiens
gacctcgaggcccttagttga

SEQ ID NO: 865 - DNA, 23 bp, Homo sapiens
gacctggagcagccaccgccgca

SEQ ID NO: 866 - DNA, 20 bp, Homo sapiens
gacctggccgccggccgctc

SEQ ID NO: 867 - DNA, 17 bp, Homo sapiens
gacctgggctgttgttg

SEQ ID NO: 868 - DNA, 20 bp, Homo sapiens
gacgaaacttcccgtcccgg

SEQ ID NO: 869 - DNA, 16 bp, Homo sapiens
gacgaagacggaaccg

SEQ ID NO: 870 - DNA, 16 bp, Homo sapiens
gacgaccccgactgcg

SEQ ID NO: 871 - DNA, 20 bp, Homo sapiens
gacgacgtagaccaggtaag

SEQ ID NO: 872 - DNA, 20 bp, Homo sapiens
gacgagaaggacagggaagg

SEQ ID NO: 873 - DNA, 19 bp, Homo sapiens
gacgagaatcgcggagcct

SEQ ID NO: 874 - DNA, 16 bp, Homo sapiens
gacgagagtgagacag

SEQ ID NO: 875 - DNA, 18 bp, Homo sapiens
gacgagatcgcgaagctt

SEQ ID NO: 876 - DNA, 19 bp, Homo sapiens
gacgagcggagaaagggac

SEQ ID NO: 877 - DNA, 19 bp, Homo sapiens
gacgagcttggaggaaaag

SEQ ID NO: 878 - DNA, 17 bp, Homo sapiens
gacgaggactactacgg

SEQ ID NO: 879 - DNA, 18 bp, Homo sapiens
gacgaggactactacggg

SEQ ID NO: 880 - DNA, 18 bp, Homo sapiens
gacgaggagaggaacagg

SEQ ID NO: 881 - DNA, 22 bp, Homo sapiens
gacgaggagaggaacaggaaga

SEQ ID NO: 882 - DNA, 17 bp, Homo sapiens
gacgaggagatcggagc

SEQ ID NO: 883 - DNA, 18 bp, Homo sapiens
gacgaggaggcgttggac

SEQ ID NO: 884 - DNA, 18 bp, Homo sapiens
gacgagggactggcggcg

SEQ ID NO: 885 - DNA, 16 bp, Homo sapiens
gacgaggtggccgaga

SEQ ID NO: 886 - DNA, 17 bp, Homo sapiens
gacgatcgggcctacag

SEQ ID NO: 887 - DNA, 17 bp, Homo sapiens
gacgcaagatggcagcc

SEQ ID NO: 888 - DNA, 18 bp, Homo sapiens
gacgcaagttgctgaagc

SEQ ID NO: 889 - DNA, 18 bp, Homo sapiens
gacgcacctgggagaaac

SEQ ID NO: 890 - DNA, 21 bp, Homo sapiens
gacgcacgctgccccggaagg

SEQ ID NO: 891 - DNA, 18 bp, Homo sapiens
gacgcactctgcgcccgg

SEQ ID NO: 892 - DNA, 17 bp, Homo sapiens
gacgcagaaggagagcg

SEQ ID NO: 893 - DNA, 18 bp, Homo sapiens
gacgccatgatggatgtg

SEQ ID NO: 894 - DNA, 18 bp, Homo sapiens
gacgccgcggaggagacc

SEQ ID NO: 895 - DNA, 19 bp, Homo sapiens
gacgccgggaacaggtggg

SEQ ID NO: 896 - DNA, 21 bp, Homo sapiens
gacgccgtgtttcctctttcg

SEQ ID NO: 897 - DNA, 22 bp, Homo sapiens
gacgccgtgtttcctctttcgg

SEQ ID NO: 898 - DNA, 18 bp, Homo sapiens
gacgcgagagacggaact

SEQ ID NO: 899 - DNA, 17 bp, Homo sapiens
gacgcgcggcggagctg

SEQ ID NO: 900 - DNA, 18 bp, Homo sapiens
gacgcgcgtctgtggaga

SEQ ID NO: 901 - DNA, 20 bp, Homo sapiens
gacgcggaggcggcagcggc

SEQ ID NO: 902 - DNA, 16 bp, Homo sapiens
gacgcggcgaaggagc

SEQ ID NO: 903 - DNA, 18 bp, Homo sapiens
gacgcggctgagacaggt

SEQ ID NO: 904 - DNA, 17 bp, Homo sapiens
gacgcgggtcggacgcg

SEQ ID NO: 905 - DNA, 17 bp, Homo sapiens
gacgcggtggcagagcc

SEQ ID NO: 906 - DNA, 18 bp, Homo sapiens
gacgctccgcattgcaga

SEQ ID NO: 907 - DNA, 17 bp, Homo sapiens
aaggaggctctagatgg

SEQ ID NO: 908 - DNA, 18 bp, Homo sapiens
aaggaggctctagatggc

SEQ ID NO: 909 - DNA, 18 bp, Homo sapiens
aaggagtgcagcggctgc

SEQ ID NO: 910 - DNA, 20 bp, Homo sapiens
aaggagtggggcgaacatgg

SEQ ID NO: 911 - DNA, 17 bp, Homo sapiens
aaggatggaaagaagcg

SEQ ID NO: 912 - DNA, 18 bp, Homo sapiens
aaggatggagctggccgc

SEQ ID NO: 913 - DNA, 17 bp, Homo sapiens
aaggatggcaggcttcg

SEQ ID NO: 914 - DNA, 17 bp, Homo sapiens
aaggatgtgaggcaggc

SEQ ID NO: 915 - DNA, 18 bp, Homo sapiens
aaggatgtgaggcaggcg

SEQ ID NO: 916 - DNA, 20 bp, Homo sapiens
aaggatgtgaggcaggcgag

SEQ ID NO: 917 - DNA, 21 bp, Homo sapiens
aaggatgtgaggcaggcgagc

SEQ ID NO: 918 - DNA, 23 bp, Homo sapiens
aaggatgtgaggcaggcgagccg

SEQ ID NO: 919 - DNA, 24 bp, Homo sapiens
aaggatgtgaggcaggcgagccgg

SEQ ID NO: 920 - DNA, 23 bp, Homo sapiens
aaggattaaaggaagcgttagtg

SEQ ID NO: 921 - DNA, 18 bp, Homo sapiens
aaggattcaggttggtgc

SEQ ID NO: 922 - DNA, 20 bp, Homo sapiens
aaggcaaggaccgagggtgg

SEQ ID NO: 923 - DNA, 17 bp, Homo sapiens
aaggcacgcggaacctc

SEQ ID NO: 924 - DNA, 19 bp, Homo sapiens
aaggcaggaggcggcgatc

SEQ ID NO: 925 - DNA, 20 bp, Homo sapiens
aaggcccagaaaaaggacgg

SEQ ID NO: 926 - DNA, 17 bp, Homo sapiens
aaggccgcgtttgcggg

SEQ ID NO: 927 - DNA, 17 bp, Homo sapiens
aaggcgagagcggagct

SEQ ID NO: 928 - DNA, 19 bp, Homo sapiens
aaggcgagagcggagctcc

SEQ ID NO: 929 - DNA, 21 bp, Homo sapiens
aaggcgagagcggagctccaa

SEQ ID NO: 930 - DNA, 20 bp, Homo sapiens
aaggcgagagctgcgaaggg

SEQ ID NO: 931 - DNA, 17 bp, Homo sapiens
aaggcgagcagacgcgg

SEQ ID NO: 932 - DNA, 17 bp, Homo sapiens
aaggcgagtagcatgtg

SEQ ID NO: 933 - DNA, 20 bp, Homo sapiens
aaggcgccggggcgctcgca

SEQ ID NO: 934 - DNA, 21 bp, Homo sapiens
aaggcgctgtcatggaggacg

SEQ ID NO: 935 - DNA, 17 bp, Homo sapiens
aaggcgcttcaggacta

SEQ ID NO: 936 - DNA, 18 bp, Homo sapiens
aaggcgcttcaggactac

SEQ ID NO: 937 - DNA, 18 bp, Homo sapiens
aaggcgggagacagcgca

SEQ ID NO: 938 - DNA, 18 bp, Homo sapiens
aaggcgggcagcagaccg

SEQ ID NO: 939 - DNA, 18 bp, Homo sapiens
aaggcgggcggagcgcac

SEQ ID NO: 940 - DNA, 23 bp, Homo sapiens
aaggcggtcgctccgggaaatcc

SEQ ID NO: 941 - DNA, 18 bp, Homo sapiens
aaggcgtgggaggaagat

SEQ ID NO: 942 - DNA, 19 bp, Homo sapiens
aaggctaagcaaggctgac

SEQ ID NO: 943 - DNA, 18 bp, Homo sapiens
aaggctgaggcgagcggg

SEQ ID NO: 944 - DNA, 19 bp, Homo sapiens
aaggctgctacgaagcgag

SEQ ID NO: 945 - DNA, 21 bp, Homo sapiens
aaggctgctacgaagcgagct

SEQ ID NO: 946 - DNA, 18 bp, Homo sapiens
aaggctggagaccgggtc

SEQ ID NO: 947 - DNA, 18 bp, Homo sapiens
aaggctgtagtgtcgggg

SEQ ID NO: 948 - DNA, 17 bp, Homo sapiens
aaggcttttcggaccca

SEQ ID NO: 949 - DNA, 18 bp, Homo sapiens
aagggaaaaggggaaacg

SEQ ID NO: 950 - DNA, 19 bp, Homo sapiens
aagggaaaaggggaaacgg

SEQ ID NO: 951 - DNA, 17 bp, Homo sapiens
aagggaaggcgcgagtg

SEQ ID NO: 952 - DNA, 17 bp, Homo sapiens
aagggacgctcaggcgg

SEQ ID NO: 953 - DNA, 17 bp, Homo sapiens
aagggacggagccaaga

SEQ ID NO: 954 - DNA, 20 bp, Homo sapiens
aagggacggagccaagatgg

SEQ ID NO: 955 - DNA, 21 bp, Homo sapiens
aagggacggagccaagatggc

SEQ ID NO: 956 - DNA, 18 bp, Homo sapiens
aagggatgaaggaggctg

SEQ ID NO: 957 - DNA, 18 bp, Homo sapiens
aagggcacgagcatcggg

SEQ ID NO: 958 - DNA, 19 bp, Homo sapiens
aagggcagaaagcaccatg

SEQ ID NO: 959 - DNA, 18 bp, Homo sapiens
aagggccgcagccagcac

SEQ ID NO: 960 - DNA, 21 bp, Homo sapiens
aagggcctggggaaagggggt

SEQ ID NO: 961 - DNA, 19 bp, Homo sapiens
aagggcgagagtgagtacc

SEQ ID NO: 962 - DNA, 20 bp, Homo sapiens
aagggcgagagtgagtacca

SEQ ID NO: 963 - DNA, 18 bp, Homo sapiens
aagggcgcgacgaagggc

SEQ ID NO: 964 - DNA, 17 bp, Homo sapiens
gacgctctcgaggacta

SEQ ID NO: 965 - DNA, 18 bp, Homo sapiens
gacgctctcgaggactac

SEQ ID NO: 966 - DNA, 21 bp, Homo sapiens
gacgctgaaggtaaagggaca

SEQ ID NO: 967 - DNA, 18 bp, Homo sapiens
gacgctgcagagtgagta

SEQ ID NO: 968 - DNA, 17 bp, Homo sapiens
gacgctgcgtggagcgg

SEQ ID NO: 969 - DNA, 18 bp, Homo sapiens
gacgctggaggatgcgga

SEQ ID NO: 970 - DNA, 18 bp, Homo sapiens
gacgctggggatgaatga

SEQ ID NO: 971 - DNA, 18 bp, Homo sapiens
gacgctgggtgtgcggtg

SEQ ID NO: 972 - DNA, 16 bp, Homo sapiens
gacggaaagggagacg

SEQ ID NO: 973 - DNA, 17 bp, Homo sapiens
gacggaaagggagacgc

SEQ ID NO: 974 - DNA, 18 bp, Homo sapiens
gacggaaagggagacgcc

SEQ ID NO: 975 - DNA, 19 bp, Homo sapiens
gacggaaagggagacgccg

SEQ ID NO: 976 - DNA, 19 bp, Homo sapiens
gacggaagaaggggagcgg

SEQ ID NO: 977 - DNA, 18 bp, Homo sapiens
gacggaagaggatggccg

SEQ ID NO: 978 - DNA, 18 bp, Homo sapiens
gacggaaggagcatggcg

SEQ ID NO: 979 - DNA, 19 bp, Homo sapiens
gacggaaggagcggcggcg

SEQ ID NO: 980 - DNA, 18 bp, Homo sapiens
gacggaaggctgaggcga

SEQ ID NO: 981 - DNA, 18 bp, Homo sapiens
gacggaatctgctagggc

SEQ ID NO: 982 - DNA, 18 bp, Homo sapiens
gacggaatggaggaggtg

SEQ ID NO: 983 - DNA, 19 bp, Homo sapiens
gacggaatggaggaggtgc

SEQ ID NO: 984 - DNA, 18 bp, Homo sapiens
gacggaattcgggaccga

SEQ ID NO: 985 - DNA, 19 bp, Homo sapiens
gacggaattcgggaccgac

SEQ ID NO: 986 - DNA, 18 bp, Homo sapiens
gacggaccagagcaggta

SEQ ID NO: 987 - DNA, 18 bp, Homo sapiens
gacggacgcaagatggcg

SEQ ID NO: 988 - DNA, 19 bp, Homo sapiens
gacggacgcaagatggcga

SEQ ID NO: 989 - DNA, 18 bp, Homo sapiens
gacggagaacaggttatg

SEQ ID NO: 990 - DNA, 19 bp, Homo sapiens
gacggagactgcccaggtg

SEQ ID NO: 991 - DNA, 18 bp, Homo sapiens
gacggagaggcggaaagg

SEQ ID NO: 992 - DNA, 17 bp, Homo sapiens
gacggagcgggcggctg

SEQ ID NO: 993 - DNA, 18 bp, Homo sapiens
gacggaggaaacagaaga

SEQ ID NO: 994 - DNA, 21 bp, Homo sapiens
gacggaggaaggtctgaggag

SEQ ID NO: 995 - DNA, 18 bp, Homo sapiens
gacggaggggggtgactt

SEQ ID NO: 996 - DNA, 17 bp, Homo sapiens
gacggagggtggagggc

SEQ ID NO: 997 - DNA, 18 bp, Homo sapiens
gacggagggtggagggcc

SEQ ID NO: 998 - DNA, 16 bp, Homo sapiens
gacggatacagggagg

SEQ ID NO: 999 - DNA, 17 bp, Homo sapiens
gacggatagactggggg

SEQ ID NO: 1000 - DNA, 18 bp, Homo sapiens
gacggatagactgggggc

SEQ ID NO: 1001 - DNA, 18 bp, Homo sapiens
gacggatgaaagtacggg

SEQ ID NO: 1002 - DNA, 21 bp, Homo sapiens
gacggcagcggcagcctctga

SEQ ID NO: 1003 - DNA, 17 bp, Homo sapiens
gacggcagcgggagcgg

SEQ ID NO: 1004 - DNA, 18 bp, Homo sapiens
gacggcaggctttgagtg

SEQ ID NO: 1005 - DNA, 17 bp, Homo sapiens
gacggcagggaagttcg

SEQ ID NO: 1006 - DNA, 16 bp, Homo sapiens
gacggccagtgggaga

SEQ ID NO: 1007 - DNA, 17 bp, Homo sapiens
gacggcccggacagttc

SEQ ID NO: 1008 - DNA, 22 bp, Homo sapiens
gacggccgcgcgggagcggtca

SEQ ID NO: 1009 - DNA, 22 bp, Homo sapiens
gacggcctggcccggagcgggc

SEQ ID NO: 1010 - DNA, 21 bp, Homo sapiens
gacggcgaagtggactacaaa

SEQ ID NO: 1011 - DNA, 21 bp, Homo sapiens
gacggcgacactttgctacgg

SEQ ID NO: 1012 - DNA, 17 bp, Homo sapiens
gacggcgcgaaactcct

SEQ ID NO: 1013 - DNA, 19 bp, Homo sapiens
gacggcgcggaggagctgg

SEQ ID NO: 1014 - DNA, 18 bp, Homo sapiens
gacggcggccgagacgga

SEQ ID NO: 1015 - DNA, 18 bp, Homo sapiens
gacggctgcatttacggg

SEQ ID NO: 1016 - DNA, 18 bp, Homo sapiens
gacggctggagccgcagc

SEQ ID NO: 1017 - DNA, 16 bp, Homo sapiens
gacggcttcggggatg

SEQ ID NO: 1018 - DNA, 19 bp, Homo sapiens
gacgggaaggagccgagct

SEQ ID NO: 1019 - DNA, 18 bp, Homo sapiens
gacgggaagttgcggctg

SEQ ID NO: 1020 - DNA, 16 bp, Homo sapiens
gacgggaggcgagcaa

SEQ ID NO: 1021 - DNA, 18 bp, Homo sapiens
aagggcgcggagagcccc

SEQ ID NO: 1022 - DNA, 16 bp, Homo sapiens
aagggcggccgtggcc

SEQ ID NO: 1023 - DNA, 18 bp, Homo sapiens
aagggcgggagggagcgg

SEQ ID NO: 1024 - DNA, 19 bp, Homo sapiens
aagggcgggagggagcggt

SEQ ID NO: 1025 - DNA, 18 bp, Homo sapiens
aagggcgggtggttaggt

SEQ ID NO: 1026 - DNA, 18 bp, Homo sapiens
aagggcgtcgcccaaagc

SEQ ID NO: 1027 - DNA, 18 bp, Homo sapiens
aagggctggtccagcggc

SEQ ID NO: 1028 - DNA, 17 bp, Homo sapiens
aaggggcaggggacacc

SEQ ID NO: 1029 - DNA, 20 bp, Homo sapiens
aagggtaccggtgaccgcta

SEQ ID NO: 1030 - DNA, 18 bp, Homo sapiens
aagggtgcagtacctaag

SEQ ID NO: 1031 - DNA, 19 bp, Homo sapiens
aagggtggcccaggtgggg

SEQ ID NO: 1032 - DNA, 18 bp, Homo sapiens
aaggtaaatgccggcgcc

SEQ ID NO: 1033 - DNA, 20 bp, Homo sapiens
aaggtcaagtgaagctgctc

SEQ ID NO: 1034 - DNA, 20 bp, Homo sapiens
aaggtcagggccgctgggcg

SEQ ID NO: 1035 - DNA, 18 bp, Homo sapiens
aaggtgaggtacttcctg

SEQ ID NO: 1036 - DNA, 23 bp, Homo sapiens
aaggtgcgcagtagtgggctggg

SEQ ID NO: 1037 - DNA, 18 bp, Homo sapiens
aaggtggagaacgaggag

SEQ ID NO: 1038 - DNA, 17 bp, Homo sapiens
aaggtgggttcgctggt

SEQ ID NO: 1039 - DNA, 16 bp, Homo sapiens
aaggtgtgcgggcggg

SEQ ID NO: 1040 - DNA, 18 bp, Homo sapiens
aaggttccgcgccgggcg

SEQ ID NO: 1041 - DNA, 18 bp, Homo sapiens
aaggttttgccgtccgaa

SEQ ID NO: 1042 - DNA, 17 bp, Homo sapiens
aagtaaccatagcggcg

SEQ ID NO: 1043 - DNA, 18 bp, Homo sapiens
aagtacccgcgcgcgggc

SEQ ID NO: 1044 - DNA, 19 bp, Homo sapiens
aagtagcagtcctgtcatg

SEQ ID NO: 1045 - DNA, 24 bp, Homo sapiens
aagtagcggacacggaacagggaa

SEQ ID NO: 1046 - DNA, 21 bp, Homo sapiens
aagtagctccgaacaggaaga

SEQ ID NO: 1047 - DNA, 17 bp, Homo sapiens
aagtaggaacgagaagc

SEQ ID NO: 1048 - DNA, 18 bp, Homo sapiens
aagtagtcgcggaatctc

SEQ ID NO: 1049 - DNA, 21 bp, Homo sapiens
aagtcagcgctggagtcggct

SEQ ID NO: 1050 - DNA, 17 bp, Homo sapiens
aagtcatggcggcgctg

SEQ ID NO: 1051 - DNA, 20 bp, Homo sapiens
aagtccggctgggccgggac

SEQ ID NO: 1052 - DNA, 17 bp, Homo sapiens
aagtcggcaggcgagac

SEQ ID NO: 1053 - DNA, 20 bp, Homo sapiens
aagtcggtggcgtaggtcgt

SEQ ID NO: 1054 - DNA, 22 bp, Homo sapiens
aagtctaccggcggcaaagctc

SEQ ID NO: 1055 - DNA, 20 bp, Homo sapiens
aagtctcagaggctggagag

SEQ ID NO: 1056 - DNA, 18 bp, Homo sapiens
aagtgaacgaggcggctg

SEQ ID NO: 1057 - DNA, 21 bp, Homo sapiens
aagtgaacgtgatctcgggtt

SEQ ID NO: 1058 - DNA, 21 bp, Homo sapiens
aagtgaagtccccgagcacgt

SEQ ID NO: 1059 - DNA, 22 bp, Homo sapiens
aagtgaatcaggcgccgggtag

SEQ ID NO: 1060 - DNA, 17 bp, Homo sapiens
aagtgacgagagccggg

SEQ ID NO: 1061 - DNA, 18 bp, Homo sapiens
aagtgacgccgagggcct

SEQ ID NO: 1062 - DNA, 16 bp, Homo sapiens
aagtgacgtgagcggg

SEQ ID NO: 1063 - DNA, 18 bp, Homo sapiens
aagtgactgcgcggcccg

SEQ ID NO: 1064 - DNA, 18 bp, Homo sapiens
aagtgagactagggagtc

SEQ ID NO: 1065 - DNA, 18 bp, Homo sapiens
aagtgatcgctgtgtgaa

SEQ ID NO: 1066 - DNA, 17 bp, Homo sapiens
aagtgcgatggaacctt

SEQ ID NO: 1067 - DNA, 19 bp, Homo sapiens
aagtgcggccgccggaact

SEQ ID NO: 1068 - DNA, 16 bp, Homo sapiens
aagtgcgggcgagcgc

SEQ ID NO: 1069 - DNA, 22 bp, Homo sapiens
aagtgctacgcggaggattaga

SEQ ID NO: 1070 - DNA, 18 bp, Homo sapiens
aagtggaaaacttaaggc

SEQ ID NO: 1071 - DNA, 17 bp, Homo sapiens
aagtggcctaaaacttc

SEQ ID NO: 1072 - DNA, 22 bp, Homo sapiens
aagtgtcgcagcattctctgca

SEQ ID NO: 1073 - DNA, 19 bp, Homo sapiens
aagtgtctcgcagatagta

SEQ ID NO: 1074 - DNA, 18 bp, Homo sapiens
aagtgtctcttagcagcg

SEQ ID NO: 1075 - DNA, 19 bp, Homo sapiens
aagtgtgagcgccgcggcg

SEQ ID NO: 1076 - DNA, 24 bp, Homo sapiens
aagtgtggagaaagcggctctggg

SEQ ID NO: 1077 - DNA, 21 bp, Homo sapiens
aagtgtggcttcgtttacagt

SEQ ID NO: 1078 - DNA, 18 bp, Homo sapiens
gacgggagggcacgggag

SEQ ID NO: 1079 - DNA, 16 bp, Homo sapiens
gacgggcaggaaacca

SEQ ID NO: 1080 - DNA, 20 bp, Homo sapiens
gacgggcgcaaaaacatgag

SEQ ID NO: 1081 - DNA, 18 bp, Homo sapiens
gacgggcggactgacggg

SEQ ID NO: 1082 - DNA, 18 bp, Homo sapiens
gacggggcccggctccgg

SEQ ID NO: 1083 - DNA, 18 bp, Homo sapiens
gacgggggagtgcgactg

SEQ ID NO: 1084 - DNA, 19 bp, Homo sapiens
gacgggtatgtaatcgggc

SEQ ID NO: 1085 - DNA, 18 bp, Homo sapiens
gacgggtctgcgccgccg

SEQ ID NO: 1086 - DNA, 18 bp, Homo sapiens
gacgggtgagtcgcacgt

SEQ ID NO: 1087 - DNA, 18 bp, Homo sapiens
gacgggtttgaaatggct

SEQ ID NO: 1088 - DNA, 21 bp, Homo sapiens
gacgggtttgaaatggcttcg

SEQ ID NO: 1089 - DNA, 17 bp, Homo sapiens
gacggtaagctggggta

SEQ ID NO: 1090 - DNA, 20 bp, Homo sapiens
gacggtaccaagaagggacg

SEQ ID NO: 1091 - DNA, 21 bp, Homo sapiens
gacggtaccatgaaggacgag

SEQ ID NO: 1092 - DNA, 17 bp, Homo sapiens
gacggtagaacgggcga

SEQ ID NO: 1093 - DNA, 19 bp, Homo sapiens
gacggtatcacttcggctg

SEQ ID NO: 1094 - DNA, 16 bp, Homo sapiens
gacggtgactgttcgg

SEQ ID NO: 1095 - DNA, 18 bp, Homo sapiens
gacggtgagcgccgagat

SEQ ID NO: 1096 - DNA, 18 bp, Homo sapiens
gacggtgaggtcagcttc

SEQ ID NO: 1097 - DNA, 19 bp, Homo sapiens
gacggtgccgacgcagcgg

SEQ ID NO: 1098 - DNA, 18 bp, Homo sapiens
gacggtgggaacggaagt

SEQ ID NO: 1099 - DNA, 18 bp, Homo sapiens
gacggtggggggtagggt

SEQ ID NO: 1100 - DNA, 18 bp, Homo sapiens
gacggtgtaggccgctgc

SEQ ID NO: 1101 - DNA, 18 bp, Homo sapiens
gacggttggagaagaagg

SEQ ID NO: 1102 - DNA, 18 bp, Homo sapiens
gacggtttgtgaccccct

SEQ ID NO: 1103 - DNA, 19 bp, Homo sapiens
gacgtaggaggaaggagac

SEQ ID NO: 1104 - DNA, 17 bp, Homo sapiens
gacgtaggagtgggtct

SEQ ID NO: 1105 - DNA, 18 bp, Homo sapiens
gacgtaggagtgggtctt

SEQ ID NO: 1106 - DNA, 20 bp, Homo sapiens
gacgtcacagctaagcgcct

SEQ ID NO: 1107 - DNA, 20 bp, Homo sapiens
gacgtccggcttcggagcgg

SEQ ID NO: 1108 - DNA, 18 bp, Homo sapiens
gacgtcggaggagccggg

SEQ ID NO: 1109 - DNA, 19 bp, Homo sapiens
gacgtgactggctagctgc

SEQ ID NO: 1110 - DNA, 20 bp, Homo sapiens
gacgtgataggcctgccttc

SEQ ID NO: 1111 - DNA, 17 bp, Homo sapiens
gacgtgcggctcgagga

SEQ ID NO: 1112 - DNA, 17 bp, Homo sapiens
gacgtggagcgaaatga

SEQ ID NO: 1113 - DNA, 20 bp, Homo sapiens
gacgtggagcgaaatgagct

SEQ ID NO: 1114 - DNA, 20 bp, Homo sapiens
gacgtggatcggtaccaggc

SEQ ID NO: 1115 - DNA, 18 bp, Homo sapiens
gacgtggatggcgggaat

SEQ ID NO: 1116 - DNA, 17 bp, Homo sapiens
gacgtgggacgggaagg

SEQ ID NO: 1117 - DNA, 19 bp, Homo sapiens
gacgtgttcgggcagctgg

SEQ ID NO: 1118 - DNA, 18 bp, Homo sapiens
gacgttggacgacaaaga

SEQ ID NO: 1119 - DNA, 19 bp, Homo sapiens
gactcaagatggcggcgtg

SEQ ID NO: 1120 - DNA, 23 bp, Homo sapiens
gactcaagctggtgaatccgcga

SEQ ID NO: 1121 - DNA, 17 bp, Homo sapiens
gactcacgtcgcactcc

SEQ ID NO: 1122 - DNA, 21 bp, Homo sapiens
gactcagacagtgcaggacga

SEQ ID NO: 1123 - DNA, 18 bp, Homo sapiens
gactcagagctacggcca

SEQ ID NO: 1124 - DNA, 18 bp, Homo sapiens
gactcatctcgggcagag

SEQ ID NO: 1125 - DNA, 17 bp, Homo sapiens
gactccgcaggaccccg

SEQ ID NO: 1126 - DNA, 16 bp, Homo sapiens
gactcgattgttggtg

SEQ ID NO: 1127 - DNA, 16 bp, Homo sapiens
gactcgcgtcgcggcc

SEQ ID NO: 1128 - DNA, 18 bp, Homo sapiens
gactcggcccagaagccg

SEQ ID NO: 1129 - DNA, 19 bp, Homo sapiens
gactcggcccagaagccga

SEQ ID NO: 1130 - DNA, 16 bp, Homo sapiens
gactcggggttggatg

SEQ ID NO: 1131 - DNA, 20 bp, Homo sapiens
gactcgttggggaggtggcc

SEQ ID NO: 1132 - DNA, 21 bp, Homo sapiens
gactctgagtccgacgttggc

SEQ ID NO: 1133 - DNA, 18 bp, Homo sapiens
gactgaggcacgagcggg

SEQ ID NO: 1134 - DNA, 18 bp, Homo sapiens
gactgccacactttgcaa

SEQ ID NO: 1135 - DNA, 18 bp, Homo sapiens
aagttactgtgaggcggc

SEQ ID NO: 1136 - DNA, 19 bp, Homo sapiens
aagttccagcgcagctaga

SEQ ID NO: 1137 - DNA, 16 bp, Homo sapiens
aagttcccaagggcgg

SEQ ID NO: 1138 - DNA, 19 bp, Homo sapiens
aagttcccaagggcggaaa

SEQ ID NO: 1139 - DNA, 19 bp, Homo sapiens
aagttccgcgcgcaggcca

SEQ ID NO: 1140 - DNA, 19 bp, Homo sapiens
aagttctatggccgctgca

SEQ ID NO: 1141 - DNA, 18 bp, Homo sapiens
aagtttgtggcggaggtg

SEQ ID NO: 1142 - DNA, 19 bp, Homo sapiens
aataaagtttctccaggga

SEQ ID NO: 1143 - DNA, 22 bp, Homo sapiens
aataatgaaggtggctgcggcg

SEQ ID NO: 1144 - DNA, 22 bp, Homo sapiens
aataatggcaaactcgacgggg

SEQ ID NO: 1145 - DNA, 19 bp, Homo sapiens
aatagccaacccttttctt

SEQ ID NO: 1146 - DNA, 22 bp, Homo sapiens
aatagcgcagcgggattctcac

SEQ ID NO: 1147 - DNA, 18 bp, Homo sapiens
aataggacggaaacgccg

SEQ ID NO: 1148 - DNA, 17 bp, Homo sapiens
aatatccgggaatggaa

SEQ ID NO: 1149 - DNA, 18 bp, Homo sapiens
aatcaagaagttggcgtg

SEQ ID NO: 1150 - DNA, 17 bp, Homo sapiens
aatcacagaatgaaggc

SEQ ID NO: 1151 - DNA, 20 bp, Homo sapiens
aatcagagagagagaggcgg

SEQ ID NO: 1152 - DNA, 18 bp, Homo sapiens
aatccctacgcgtccctt

SEQ ID NO: 1153 - DNA, 19 bp, Homo sapiens
aatcgactgaagagacgcc

SEQ ID NO: 1154 - DNA, 18 bp, Homo sapiens
aatcgagcgccgagagag

SEQ ID NO: 1155 - DNA, 17 bp, Homo sapiens
aatcgcgggcaaagatg

SEQ ID NO: 1156 - DNA, 17 bp, Homo sapiens
aatcgtgacgggcagga

SEQ ID NO: 1157 - DNA, 18 bp, Homo sapiens
aatcgtgggtgggatggc

SEQ ID NO: 1158 - DNA, 16 bp, Homo sapiens
aatctagctctgaagg

SEQ ID NO: 1159 - DNA, 18 bp, Homo sapiens
aatctagctctgaaggca

SEQ ID NO: 1160 - DNA, 23 bp, Homo sapiens
aatctagctctgaaggcatggcg

SEQ ID NO: 1161 - DNA, 17 bp, Homo sapiens
aatctaggagtcggttt

SEQ ID NO: 1162 - DNA, 21 bp, Homo sapiens
aatctgccccagcggccgctg

SEQ ID NO: 1163 - DNA, 16 bp, Homo sapiens
aatctggggcagcgcg

SEQ ID NO: 1164 - DNA, 18 bp, Homo sapiens
aatcttagaagagagccc

SEQ ID NO: 1165 - DNA, 20 bp, Homo sapiens
aatcttattttgttgcgagg

SEQ ID NO: 1166 - DNA, 21 bp, Homo sapiens
aatgaagggtgagaagactag

SEQ ID NO: 1167 - DNA, 18 bp, Homo sapiens
aatgacagaactacagca

SEQ ID NO: 1168 - DNA, 18 bp, Homo sapiens
aatgagactgttcgtgag

SEQ ID NO: 1169 - DNA, 21 bp, Homo sapiens
aatgagcggacggcaaagaac

SEQ ID NO: 1170 - DNA, 21 bp, Homo sapiens
aatgatcgagatggcggcgga

SEQ ID NO: 1171 - DNA, 16 bp, Homo sapiens
aatgcacaggtgcggt

SEQ ID NO: 1172 - DNA, 20 bp, Homo sapiens
aatgcagagctggagtcgtg

SEQ ID NO: 1173 - DNA, 18 bp, Homo sapiens
aatgcgactccatctccc

SEQ ID NO: 1174 - DNA, 21 bp, Homo sapiens
aatgctgaactgctctttgga

SEQ ID NO: 1175 - DNA, 16 bp, Homo sapiens
aatggagcggttgacg

SEQ ID NO: 1176 - DNA, 18 bp, Homo sapiens
aatggcacggtgagtgtt

SEQ ID NO: 1177 - DNA, 18 bp, Homo sapiens
aatggcgagctaagccgg

SEQ ID NO: 1178 - DNA, 16 bp, Homo sapiens
aatggcgctggccgct

SEQ ID NO: 1179 - DNA, 22 bp, Homo sapiens
aatggcggaaggagaagatgtg

SEQ ID NO: 1180 - DNA, 23 bp, Homo sapiens
aatggcggcgcccatgctgcgct

SEQ ID NO: 1181 - DNA, 23 bp, Homo sapiens
aatggcggcgctcacaattgcca

SEQ ID NO: 1182 - DNA, 18 bp, Homo sapiens
aatggcggcgctgacgag

SEQ ID NO: 1183 - DNA, 18 bp, Homo sapiens
aatggcgggcagtagccg

SEQ ID NO: 1184 - DNA, 18 bp, Homo sapiens
aatggcggtgcccacgga

SEQ ID NO: 1185 - DNA, 17 bp, Homo sapiens
aatggcgtcggcgagtc

SEQ ID NO: 1186 - DNA, 18 bp, Homo sapiens
aatgggagatggtagggg

SEQ ID NO: 1187 - DNA, 17 bp, Homo sapiens
aatgggagggtcgcggg

SEQ ID NO: 1188 - DNA, 16 bp, Homo sapiens
aatgggccacagaacc

SEQ ID NO: 1189 - DNA, 22 bp, Homo sapiens
aatggtggagccgaagctcggc

SEQ ID NO: 1190 - DNA, 18 bp, Homo sapiens
aatgtaagttcaaatacc

SEQ ID NO: 1191 - DNA, 16 bp, Homo sapiens
aatgtgaggcggagcg

SEQ ID NO: 1192 - DNA, 18 bp, Homo sapiens
gactgccctttcccaaga

SEQ ID NO: 1193 - DNA, 18 bp, Homo sapiens
gactgccggccgccggga

SEQ ID NO: 1194 - DNA, 16 bp, Homo sapiens
gactgccgggcgcatg

SEQ ID NO: 1195 - DNA, 16 bp, Homo sapiens
gactgcgaggtggccg

SEQ ID NO: 1196 - DNA, 17 bp, Homo sapiens
gactgcggccgtgttct

SEQ ID NO: 1197 - DNA, 17 bp, Homo sapiens
gactgcgtcgcgatgtg

SEQ ID NO: 1198 - DNA, 17 bp, Homo sapiens
gactgctaggcgaggag

SEQ ID NO: 1199 - DNA, 19 bp, Homo sapiens
gactgctgtcggtgtcgcg

SEQ ID NO: 1200 - DNA, 21 bp, Homo sapiens
gactgcttccggccagaggtc

SEQ ID NO: 1201 - DNA, 19 bp, Homo sapiens
gactgctttcggcttgctc

SEQ ID NO: 1202 - DNA, 21 bp, Homo sapiens
gactgctttcggcttgctcgg

SEQ ID NO: 1203 - DNA, 19 bp, Homo sapiens
gactggactgagaagctac

SEQ ID NO: 1204 - DNA, 16 bp, Homo sapiens
gactggatacggcgga

SEQ ID NO: 1205 - DNA, 18 bp, Homo sapiens
gactgggaagatggccgt

SEQ ID NO: 1206 - DNA, 17 bp, Homo sapiens
gactggttcgccgcggg

SEQ ID NO: 1207 - DNA, 18 bp, Homo sapiens
gactgtcagggtagtggg

SEQ ID NO: 1208 - DNA, 19 bp, Homo sapiens
gactgtctgaaagctctgc

SEQ ID NO: 1209 - DNA, 18 bp, Homo sapiens
gactgtggagttagcgtc

SEQ ID NO: 1210 - DNA, 20 bp, Homo sapiens
gactgtggagttagcgtcct

SEQ ID NO: 1211 - DNA, 18 bp, Homo sapiens
gacttccggccggaccgc

SEQ ID NO: 1212 - DNA, 18 bp, Homo sapiens
gacttcgagccatggcgg

SEQ ID NO: 1213 - DNA, 24 bp, Homo sapiens
gacttcgcgggagtcgccggcgga

SEQ ID NO: 1214 - DNA, 18 bp, Homo sapiens
gacttcggggccaagatg

SEQ ID NO: 1215 - DNA, 18 bp, Homo sapiens
gacttgaacacttccttc

SEQ ID NO: 1216 - DNA, 17 bp, Homo sapiens
gacttgcagcggctaca

SEQ ID NO: 1217 - DNA, 18 bp, Homo sapiens
gactttagttcggcccta

SEQ ID NO: 1218 - DNA, 20 bp, Homo sapiens
gacttttctcgcgctggtct

SEQ ID NO: 1219 - DNA, 18 bp, Homo sapiens
gagaaaaggaggggcgta

SEQ ID NO: 1220 - DNA, 18 bp, Homo sapiens
gagaaacgggagcaagag

SEQ ID NO: 1221 - DNA, 18 bp, Homo sapiens
gagaaactacggcgactg

SEQ ID NO: 1222 - DNA, 18 bp, Homo sapiens
gagaaactgctgagacga

SEQ ID NO: 1223 - DNA, 18 bp, Homo sapiens
gagaaagacggagaggca

SEQ ID NO: 1224 - DNA, 19 bp, Homo sapiens
gagaaagagggacctagcg

SEQ ID NO: 1225 - DNA, 17 bp, Homo sapiens
gagaaaggcagagagag

SEQ ID NO: 1226 - DNA, 18 bp, Homo sapiens
gagaaaggcggcggtgcg

SEQ ID NO: 1227 - DNA, 19 bp, Homo sapiens
gagaaagtttacgccgaca

SEQ ID NO: 1228 - DNA, 18 bp, Homo sapiens
gagaaatccggttaaaat

SEQ ID NO: 1229 - DNA, 19 bp, Homo sapiens
gagaaatcgcttggacttc

SEQ ID NO: 1230 - DNA, 18 bp, Homo sapiens
gagaaccgttgtggcgag

SEQ ID NO: 1231 - DNA, 18 bp, Homo sapiens
gagaacctggggaccggc

SEQ ID NO: 1232 - DNA, 18 bp, Homo sapiens
gagaacctttgcacgcgc

SEQ ID NO: 1233 - DNA, 19 bp, Homo sapiens
gagaacctttgcacgcgca

SEQ ID NO: 1234 - DNA, 16 bp, Homo sapiens
gagaacgcgggtccac

SEQ ID NO: 1235 - DNA, 18 bp, Homo sapiens
gagaacggacggcgatgg

SEQ ID NO: 1236 - DNA, 17 bp, Homo sapiens
gagaacggagcggacgc

SEQ ID NO: 1237 - DNA, 18 bp, Homo sapiens
gagaacggagcggacgcc

SEQ ID NO: 1238 - DNA, 19 bp, Homo sapiens
gagaacggagcggacgcca

SEQ ID NO: 1239 - DNA, 18 bp, Homo sapiens
gagaacttagagaaggaa

SEQ ID NO: 1240 - DNA, 19 bp, Homo sapiens
gagaagaaaccggcaccct

SEQ ID NO: 1241 - DNA, 23 bp, Homo sapiens
gagaagaattccttggactgcgg

SEQ ID NO: 1242 - DNA, 19 bp, Homo sapiens
gagaagagacgcagaagga

SEQ ID NO: 1243 - DNA, 20 bp, Homo sapiens
gagaagcaaggtggcctcca

SEQ ID NO: 1244 - DNA, 18 bp, Homo sapiens
gagaagcgagatttattc

SEQ ID NO: 1245 - DNA, 16 bp, Homo sapiens
gagaagcgtgacccgg

SEQ ID NO: 1246 - DNA, 18 bp, Homo sapiens
gagaagctacccgcgggg

SEQ ID NO: 1247 - DNA, 18 bp, Homo sapiens
gagaagctgcggcgagtc

SEQ ID NO: 1248 - DNA, 20 bp, Homo sapiens
gagaagctggggagaaggcg

SEQ ID NO: 1249 - DNA, 17 bp, Homo sapiens
aatgtgaggcggagcgg

SEQ ID NO: 1250 - DNA, 18 bp, Homo sapiens
aatgtgaggcggagcggc

SEQ ID NO: 1251 - DNA, 23 bp, Homo sapiens
aatgtgcgagtccatagctgaag

SEQ ID NO: 1252 - DNA, 22 bp, Homo sapiens
aatgtggaaggtggcggcgcgc

SEQ ID NO: 1253 - DNA, 23 bp, Homo sapiens
aattatggcggcggtggatatcc

SEQ ID NO: 1254 - DNA, 18 bp, Homo sapiens
aattcacgttgtcttcgg

SEQ ID NO: 1255 - DNA, 18 bp, Homo sapiens
aattccatcggacagttg

SEQ ID NO: 1256 - DNA, 21 bp, Homo sapiens
aattctctttcccatcttgca

SEQ ID NO: 1257 - DNA, 18 bp, Homo sapiens
aattgaggaaactgtggc

SEQ ID NO: 1258 - DNA, 16 bp, Homo sapiens
aattgccaagctgctg

SEQ ID NO: 1259 - DNA, 18 bp, Homo sapiens
aattgggggaaagaaggc

SEQ ID NO: 1260 - DNA, 22 bp, Homo sapiens
aattgggggaaagaaggctttt

SEQ ID NO: 1261 - DNA, 23 bp, Homo sapiens
aattgggggaaagaaggcttttt

SEQ ID NO: 1262 - DNA, 17 bp, Homo sapiens
aattgtaggaggacgag

SEQ ID NO: 1263 - DNA, 18 bp, Homo sapiens
aattgtcatacgacttgc

SEQ ID NO: 1264 - DNA, 20 bp, Homo sapiens
aattgtgttcgcagccgcca

SEQ ID NO: 1265 - DNA, 19 bp, Homo sapiens
aatttcaatttgaaaccta

SEQ ID NO: 1266 - DNA, 20 bp, Homo sapiens
aatttcaatttgaaacctag

SEQ ID NO: 1267 - DNA, 18 bp, Homo sapiens
aatttgaaacctagcgga

SEQ ID NO: 1268 - DNA, 18 bp, Homo sapiens
acaaaatggctgcccgag

SEQ ID NO: 1269 - DNA, 18 bp, Homo sapiens
acaaacagccccagcccc

SEQ ID NO: 1270 - DNA, 15 bp, Homo sapiens
acaaaccgccgccgc

SEQ ID NO: 1271 - DNA, 21 bp, Homo sapiens
acaaagatggcggcagggacc

SEQ ID NO: 1272 - DNA, 20 bp, Homo sapiens
acaaaggacttcctagtggg

SEQ ID NO: 1273 - DNA, 19 bp, Homo sapiens
acaaaggctgctgctgccg

SEQ ID NO: 1274 - DNA, 17 bp, Homo sapiens
acaacaaagatggcggc

SEQ ID NO: 1275 - DNA, 18 bp, Homo sapiens
acaacatggcgccgtcca

SEQ ID NO: 1276 - DNA, 17 bp, Homo sapiens
acaaccagctgactccc

SEQ ID NO: 1277 - DNA, 18 bp, Homo sapiens
acaacccggacggaagtg

SEQ ID NO: 1278 - DNA, 22 bp, Homo sapiens
acaacccggacggaagtgcctc

SEQ ID NO: 1279 - DNA, 17 bp, Homo sapiens
acaaccctgccatgatc

SEQ ID NO: 1280 - DNA, 18 bp, Homo sapiens
acaaccggaatcatgtcg

SEQ ID NO: 1281 - DNA, 19 bp, Homo sapiens
acaacggtgatggcgggca

SEQ ID NO: 1282 - DNA, 22 bp, Homo sapiens
acaagagagaggaagcttgaag

SEQ ID NO: 1283 - DNA, 18 bp, Homo sapiens
acaagccccaaccggatc

SEQ ID NO: 1284 - DNA, 19 bp, Homo sapiens
acaagccccaaccggatcc

SEQ ID NO: 1285 - DNA, 18 bp, Homo sapiens
acaaggaaggtgagggtg

SEQ ID NO: 1286 - DNA, 17 bp, Homo sapiens
acaaggactggggacgg

SEQ ID NO: 1287 - DNA, 18 bp, Homo sapiens
acaaggactggggacggc

SEQ ID NO: 1288 - DNA, 20 bp, Homo sapiens
acaaggactggggacggcgg

SEQ ID NO: 1289 - DNA, 19 bp, Homo sapiens
acaaggattaaaggaagcg

SEQ ID NO: 1290 - DNA, 18 bp, Homo sapiens
acaaggcggggctgctag

SEQ ID NO: 1291 - DNA, 22 bp, Homo sapiens
acaaggctcagaagaaggatgg

SEQ ID NO: 1292 - DNA, 18 bp, Homo sapiens
acaagggcaacgagcgtt

SEQ ID NO: 1293 - DNA, 18 bp, Homo sapiens
acaagtggagtgggctgc

SEQ ID NO: 1294 - DNA, 16 bp, Homo sapiens
acaatagaggccgcgc

SEQ ID NO: 1295 - DNA, 18 bp, Homo sapiens
acaatggcggcgcccatg

SEQ ID NO: 1296 - DNA, 18 bp, Homo sapiens
acacaaccagctgactcc

SEQ ID NO: 1297 - DNA, 20 bp, Homo sapiens
acacaaccagctgactcccg

SEQ ID NO: 1298 - DNA, 23 bp, Homo sapiens
acacaaccagctgactcccgtag

SEQ ID NO: 1299 - DNA, 16 bp, Homo sapiens
acacacggcacaagat

SEQ ID NO: 1300 - DNA, 21 bp, Homo sapiens
acacagagtaagagttgagga

SEQ ID NO: 1301 - DNA, 19 bp, Homo sapiens
acacaggatccggagctgg

SEQ ID NO: 1302 - DNA, 18 bp, Homo sapiens
acacaggccagagcttcg

SEQ ID NO: 1303 - DNA, 18 bp, Homo sapiens
acacagtatggccggcga

SEQ ID NO: 1304 - DNA, 21 bp, Homo sapiens
acacagtatggccggcgacat

SEQ ID NO: 1305 - DNA, 21 bp, Homo sapiens
acaccatgcagtcggatgatg

SEQ ID NO: 1306 - DNA, 16 bp, Homo sapiens
gagaagggaaacacac

SEQ ID NO: 1307 - DNA, 21 bp, Homo sapiens
gagaagggaaacacacggcta

SEQ ID NO: 1308 - DNA, 18 bp, Homo sapiens
gagaagggtgatacggag

SEQ ID NO: 1309 - DNA, 19 bp, Homo sapiens
gagaagggtgatacggaga

SEQ ID NO: 1310 - DNA, 23 bp, Homo sapiens
gagaatggagagagcagtgagag

SEQ ID NO: 1311 - DNA, 17 bp, Homo sapiens
gagacagaaggaaccgg

SEQ ID NO: 1312 - DNA, 20 bp, Homo sapiens
gagacagaggcaccccggac

SEQ ID NO: 1313 - DNA, 19 bp, Homo sapiens
gagacagcgcagtttgaat

SEQ ID NO: 1314 - DNA, 20 bp, Homo sapiens
gagacagcgcagtttgaatc

SEQ ID NO: 1315 - DNA, 17 bp, Homo sapiens
gagacatcgagaggaag

SEQ ID NO: 1316 - DNA, 17 bp, Homo sapiens
gagaccactgagacgag

SEQ ID NO: 1317 - DNA, 18 bp, Homo sapiens
gagaccaggagtaagggg

SEQ ID NO: 1318 - DNA, 20 bp, Homo sapiens
gagaccatgctgctgttctg

SEQ ID NO: 1319 - DNA, 22 bp, Homo sapiens
gagaccggcgcgtgaggaacct

SEQ ID NO: 1320 - DNA, 19 bp, Homo sapiens
gagacgaagacggaaccgg

SEQ ID NO: 1321 - DNA, 18 bp, Homo sapiens
gagacgagatggatgcca

SEQ ID NO: 1322 - DNA, 23 bp, Homo sapiens
gagacgaggctaccatgaaggag

SEQ ID NO: 1323 - DNA, 18 bp, Homo sapiens
gagacggacatgaagcaa

SEQ ID NO: 1324 - DNA, 18 bp, Homo sapiens
gagacggtgccgaaggac

SEQ ID NO: 1325 - DNA, 19 bp, Homo sapiens
gagacggtgggagcggttg

SEQ ID NO: 1326 - DNA, 16 bp, Homo sapiens
gagacgtaggagtggg

SEQ ID NO: 1327 - DNA, 17 bp, Homo sapiens
gagacgtaggagtgggt

SEQ ID NO: 1328 - DNA, 19 bp, Homo sapiens
gagactgacgagtgcggtg

SEQ ID NO: 1329 - DNA, 18 bp, Homo sapiens
gagactgtagtagcggcg

SEQ ID NO: 1330 - DNA, 19 bp, Homo sapiens
gagagaaaagactgcgagg

SEQ ID NO: 1331 - DNA, 20 bp, Homo sapiens
gagagaaaagcgcttcagta

SEQ ID NO: 1332 - DNA, 23 bp, Homo sapiens
gagagaacggagcggacgccatg

SEQ ID NO: 1333 - DNA, 18 bp, Homo sapiens
gagagaactacggccctg

SEQ ID NO: 1334 - DNA, 18 bp, Homo sapiens
gagagaactgcagggagc

SEQ ID NO: 1335 - DNA, 19 bp, Homo sapiens
gagagaactgcagggagcc

SEQ ID NO: 1336 - DNA, 16 bp, Homo sapiens
gagagaaggggaaaga

SEQ ID NO: 1337 - DNA, 20 bp, Homo sapiens
gagagagaaagggttctgga

SEQ ID NO: 1338 - DNA, 18 bp, Homo sapiens
gagagagaacaggcactg

SEQ ID NO: 1339 - DNA, 18 bp, Homo sapiens
gagagagagaagagcgcc

SEQ ID NO: 1340 - DNA, 21 bp, Homo sapiens
gagagagctgagagctggagg

SEQ ID NO: 1341 - DNA, 17 bp, Homo sapiens
gagagagggatgcgacg

SEQ ID NO: 1342 - DNA, 18 bp, Homo sapiens
gagagagtcgcgacggtg

SEQ ID NO: 1343 - DNA, 19 bp, Homo sapiens
gagagagtcggagacacta

SEQ ID NO: 1344 - DNA, 17 bp, Homo sapiens
gagagagttggttggtg

SEQ ID NO: 1345 - DNA, 17 bp, Homo sapiens
gagagatcccagcgcgc

SEQ ID NO: 1346 - DNA, 17 bp, Homo sapiens
gagagccgggacccggg

SEQ ID NO: 1347 - DNA, 23 bp, Homo sapiens
gagagccttggtgagcttcaccg

SEQ ID NO: 1348 - DNA, 22 bp, Homo sapiens
gagagcgcgcagtttgcgcggc

SEQ ID NO: 1349 - DNA, 17 bp, Homo sapiens
gagagcggagcggagca

SEQ ID NO: 1350 - DNA, 18 bp, Homo sapiens
gagagcggcaagtaagca

SEQ ID NO: 1351 - DNA, 21 bp, Homo sapiens
gagagcgggtggcggtcggct

SEQ ID NO: 1352 - DNA, 19 bp, Homo sapiens
gagagcggtgtagagcgag

SEQ ID NO: 1353 - DNA, 19 bp, Homo sapiens
gagagctccgtgcgcgggc

SEQ ID NO: 1354 - DNA, 18 bp, Homo sapiens
gagagctggcagtagcag

SEQ ID NO: 1355 - DNA, 21 bp, Homo sapiens
gagagctggtttcagacttca

SEQ ID NO: 1356 - DNA, 17 bp, Homo sapiens
gagaggacagctggttg

SEQ ID NO: 1357 - DNA, 19 bp, Homo sapiens
gagaggaccatcacaacct

SEQ ID NO: 1358 - DNA, 20 bp, Homo sapiens
gagaggacgtgctctgccag

SEQ ID NO: 1359 - DNA, 19 bp, Homo sapiens
gagaggagaggacagctgg

SEQ ID NO: 1360 - DNA, 18 bp, Homo sapiens
gagaggaggaggaacggc

SEQ ID NO: 1361 - DNA, 18 bp, Homo sapiens
gagaggatgaacaacaag

SEQ ID NO: 1362 - DNA, 19 bp, Homo sapiens
gagaggcccagcgggagtc

SEQ ID NO: 1363 - DNA, 18 bp, Homo sapiens
acaccatggatctgactg

SEQ ID NO: 1364 - DNA, 19 bp, Homo sapiens
acacccagatactactcca

SEQ ID NO: 1365 - DNA, 18 bp, Homo sapiens
acaccctgagggtagcga

SEQ ID NO: 1366 - DNA, 18 bp, Homo sapiens
acacccttcttaaagcgg

SEQ ID NO: 1367 - DNA, 17 bp, Homo sapiens
acacgagaacatgcctg

SEQ ID NO: 1368 - DNA, 18 bp, Homo sapiens
acacgcagccgaggtggg

SEQ ID NO: 1369 - DNA, 16 bp, Homo sapiens
acacgccttagcgcca

SEQ ID NO: 1370 - DNA, 18 bp, Homo sapiens
acacgcgtagtaggacgg

SEQ ID NO: 1371 - DNA, 18 bp, Homo sapiens
acacggagcagggaccgg

SEQ ID NO: 1372 - DNA, 17 bp, Homo sapiens
acacgggaggccgtcgc

SEQ ID NO: 1373 - DNA, 19 bp, Homo sapiens
acacggtaagtgacctccg

SEQ ID NO: 1374 - DNA, 18 bp, Homo sapiens
acacgtggacttgggcgg

SEQ ID NO: 1375 - DNA, 20 bp, Homo sapiens
acactcgcgagcggaccgcc

SEQ ID NO: 1376 - DNA, 18 bp, Homo sapiens
acactctggatcgagtag

SEQ ID NO: 1377 - DNA, 20 bp, Homo sapiens
acactgaggggacgcggggc

SEQ ID NO: 1378 - DNA, 18 bp, Homo sapiens
acactgctcagggaagag

SEQ ID NO: 1379 - DNA, 17 bp, Homo sapiens
acagaacgggacgacgg

SEQ ID NO: 1380 - DNA, 17 bp, Homo sapiens
acagaaggaaccggcga

SEQ ID NO: 1381 - DNA, 16 bp, Homo sapiens
acagacgactgggctt

SEQ ID NO: 1382 - DNA, 19 bp, Homo sapiens
acagacggagctggagcgg

SEQ ID NO: 1383 - DNA, 18 bp, Homo sapiens
acagacggagtgacagac

SEQ ID NO: 1384 - DNA, 18 bp, Homo sapiens
acagacggtaagctgggg

SEQ ID NO: 1385 - DNA, 18 bp, Homo sapiens
acagactcccttttcttt

SEQ ID NO: 1386 - DNA, 17 bp, Homo sapiens
acagactgcgggacgga

SEQ ID NO: 1387 - DNA, 18 bp, Homo sapiens
acagacttcctgttttgc

SEQ ID NO: 1388 - DNA, 20 bp, Homo sapiens
acagagacgctcaggctgtg

SEQ ID NO: 1389 - DNA, 19 bp, Homo sapiens
acagagacgctgcaaattg

SEQ ID NO: 1390 - DNA, 24 bp, Homo sapiens
acagagatctgtagcgtaggtacg

SEQ ID NO: 1391 - DNA, 18 bp, Homo sapiens
acagagatggtggaagga

SEQ ID NO: 1392 - DNA, 18 bp, Homo sapiens
acagagcccgggcggcta

SEQ ID NO: 1393 - DNA, 19 bp, Homo sapiens
acagagcgtgttgttagag

SEQ ID NO: 1394 - DNA, 18 bp, Homo sapiens
acagaggagtcgtagcgg

SEQ ID NO: 1395 - DNA, 18 bp, Homo sapiens
acagaggcggcggagaga

SEQ ID NO: 1396 - DNA, 17 bp, Homo sapiens
acagaggcgtcaggtca

SEQ ID NO: 1397 - DNA, 20 bp, Homo sapiens
acagagggtggaaaggcgag

SEQ ID NO: 1398 - DNA, 19 bp, Homo sapiens
acagagtcatgtgctgctg

SEQ ID NO: 1399 - DNA, 18 bp, Homo sapiens
acagagtggagccatggc

SEQ ID NO: 1400 - DNA, 16 bp, Homo sapiens
acagatccggggactc

SEQ ID NO: 1401 - DNA, 17 bp, Homo sapiens
acagatccggggactct

SEQ ID NO: 1402 - DNA, 18 bp, Homo sapiens
acagattgagccgagttg

SEQ ID NO: 1403 - DNA, 19 bp, Homo sapiens
acagcagcgagaacgagga

SEQ ID NO: 1404 - DNA, 19 bp, Homo sapiens
acagcattcgggccgagat

SEQ ID NO: 1405 - DNA, 23 bp, Homo sapiens
acagccatgtattcggctcctgg

SEQ ID NO: 1406 - DNA, 21 bp, Homo sapiens
acagcccagaaagagaaagac

SEQ ID NO: 1407 - DNA, 21 bp, Homo sapiens
acagcccgggcgccgggcggc

SEQ ID NO: 1408 - DNA, 18 bp, Homo sapiens
acagcccgtgccaccaca

SEQ ID NO: 1409 - DNA, 19 bp, Homo sapiens
acagccggagacctgagcc

SEQ ID NO: 1410 - DNA, 19 bp, Homo sapiens
acagccggtaatgggacgc

SEQ ID NO: 1411 - DNA, 23 bp, Homo sapiens
acagcctcggagggtgagcgtca

SEQ ID NO: 1412 - DNA, 18 bp, Homo sapiens
acagccttaaaggaaaac

SEQ ID NO: 1413 - DNA, 19 bp, Homo sapiens
acagcgaaactctaaggca

SEQ ID NO: 1414 - DNA, 15 bp, Homo sapiens
acagcgaagatggcg

SEQ ID NO: 1415 - DNA, 18 bp, Homo sapiens
acagcgagcggagccgcg

SEQ ID NO: 1416 - DNA, 19 bp, Homo sapiens
acagcgagcggagccgcgg

SEQ ID NO: 1417 - DNA, 18 bp, Homo sapiens
acagcgatggcggcggag

SEQ ID NO: 1418 - DNA, 18 bp, Homo sapiens
acagcgcagtttgaatcg

SEQ ID NO: 1419 - DNA, 18 bp, Homo sapiens
acagcgccggtcaacatc

SEQ ID NO: 1420 - DNA, 18 bp, Homo sapiens
gagaggccggtaggcgtg

SEQ ID NO: 1421 - DNA, 18 bp, Homo sapiens
gagaggcggaaaggatgg

SEQ ID NO: 1422 - DNA, 17 bp, Homo sapiens
gagaggcggcggaatgg

SEQ ID NO: 1423 - DNA, 20 bp, Homo sapiens
gagaggcggcggcgggagcg

SEQ ID NO: 1424 - DNA, 18 bp, Homo sapiens
gagaggcgggctgaggcg

SEQ ID NO: 1425 - DNA, 22 bp, Homo sapiens
gagaggctgagagagtcggaga

SEQ ID NO: 1426 - DNA, 18 bp, Homo sapiens
gagaggcttgaggttcgg

SEQ ID NO: 1427 - DNA, 20 bp, Homo sapiens
gagagggaagaatatggccg

SEQ ID NO: 1428 - DNA, 16 bp, Homo sapiens
gagagggacaggagcg

SEQ ID NO: 1429 - DNA, 20 bp, Homo sapiens
gagagggatagtcggagcga

SEQ ID NO: 1430 - DNA, 20 bp, Homo sapiens
gagaggtgaccgccatcttg

SEQ ID NO: 1431 - DNA, 18 bp, Homo sapiens
gagaggtgggagtcggag

SEQ ID NO: 1432 - DNA, 21 bp, Homo sapiens
gagaggtttacacctgctcca

SEQ ID NO: 1433 - DNA, 18 bp, Homo sapiens
gagagtcgccgtctccaa

SEQ ID NO: 1434 - DNA, 17 bp, Homo sapiens
gagagtcggggtcggtg

SEQ ID NO: 1435 - DNA, 18 bp, Homo sapiens
gagagtgcggagtgtgtg

SEQ ID NO: 1436 - DNA, 18 bp, Homo sapiens
gagagtggctctaacaag

SEQ ID NO: 1437 - DNA, 21 bp, Homo sapiens
gagatattaagcccggactga

SEQ ID NO: 1438 - DNA, 19 bp, Homo sapiens
gagatgcatctagcgactg

SEQ ID NO: 1439 - DNA, 23 bp, Homo sapiens
gagatggaggaagatgcgaccgg

SEQ ID NO: 1440 - DNA, 18 bp, Homo sapiens
gagatggcggcggaggtg

SEQ ID NO: 1441 - DNA, 21 bp, Homo sapiens
gagatggcgggagctggtcgc

SEQ ID NO: 1442 - DNA, 18 bp, Homo sapiens
gagatggtcgcaagatgg

SEQ ID NO: 1443 - DNA, 19 bp, Homo sapiens
gagattagtgctcgcgggg

SEQ ID NO: 1444 - DNA, 18 bp, Homo sapiens
gagattcaccaggactgg

SEQ ID NO: 1445 - DNA, 16 bp, Homo sapiens
gagattctgtcgtgtc

SEQ ID NO: 1446 - DNA, 19 bp, Homo sapiens
gagattgaagatggcggct

SEQ ID NO: 1447 - DNA, 19 bp, Homo sapiens
gagattgctgggcggttct

SEQ ID NO: 1448 - DNA, 18 bp, Homo sapiens
gagcaacgtctccgagca

SEQ ID NO: 1449 - DNA, 20 bp, Homo sapiens
gagcaagacaagccactccg

SEQ ID NO: 1450 - DNA, 19 bp, Homo sapiens
gagcaagatggctgtggag

SEQ ID NO: 1451 - DNA, 20 bp, Homo sapiens
gagcaagggagtagacagca

SEQ ID NO: 1452 - DNA, 18 bp, Homo sapiens
gagcacagaacgggacga

SEQ ID NO: 1453 - DNA, 17 bp, Homo sapiens
gagcacagggcgagctc

SEQ ID NO: 1454 - DNA, 19 bp, Homo sapiens
gagcacagggcgagctctc

SEQ ID NO: 1455 - DNA, 16 bp, Homo sapiens
gagcacagtcggaggc

SEQ ID NO: 1456 - DNA, 19 bp, Homo sapiens
gagcaccaggatctcgggc

SEQ ID NO: 1457 - DNA, 18 bp, Homo sapiens
gagcaccgagctcgcggc

SEQ ID NO: 1458 - DNA, 20 bp, Homo sapiens
gagcacgcggcggcggcggt

SEQ ID NO: 1459 - DNA, 18 bp, Homo sapiens
gagcagaacgtgtagccg

SEQ ID NO: 1460 - DNA, 18 bp, Homo sapiens
gagcagacgtccagagca

SEQ ID NO: 1461 - DNA, 19 bp, Homo sapiens
gagcagacgtccagagcag

SEQ ID NO: 1462 - DNA, 21 bp, Homo sapiens
gagcagacgtccagagcagag

SEQ ID NO: 1463 - DNA, 20 bp, Homo sapiens
gagcagagcaccaagatcgt

SEQ ID NO: 1464 - DNA, 18 bp, Homo sapiens
gagcagagtcagccagca

SEQ ID NO: 1465 - DNA, 18 bp, Homo sapiens
gagcagagtcgactggga

SEQ ID NO: 1466 - DNA, 18 bp, Homo sapiens
gagcagcagcctctgagg

SEQ ID NO: 1467 - DNA, 18 bp, Homo sapiens
gagcagccattgaagggg

SEQ ID NO: 1468 - DNA, 18 bp, Homo sapiens
gagcagcggacgccggtc

SEQ ID NO: 1469 - DNA, 19 bp, Homo sapiens
gagcagcggacgccggtct

SEQ ID NO: 1470 - DNA, 18 bp, Homo sapiens
gagcaggagccggaactg

SEQ ID NO: 1471 - DNA, 18 bp, Homo sapiens
gagcaggaggaagtaggg

SEQ ID NO: 1472 - DNA, 23 bp, Homo sapiens
gagcaggcgagcgagcgggaaga

SEQ ID NO: 1473 - DNA, 18 bp, Homo sapiens
gagcagggggccgaggac

SEQ ID NO: 1474 - DNA, 19 bp, Homo sapiens
gagcagggtccgagggctg

SEQ ID NO: 1475 - DNA, 18 bp, Homo sapiens
gagcagtgatggaagggc

SEQ ID NO: 1476 - DNA, 18 bp, Homo sapiens
gagcagtggtcggagatg

SEQ ID NO: 1477 - DNA, 16 bp, Homo sapiens
acagcggacggagggg

SEQ ID NO: 1478 - DNA, 21 bp, Homo sapiens
acagcggccagcgcagcggca

SEQ ID NO: 1479 - DNA, 18 bp, Homo sapiens
acagcggctggtctggaa

SEQ ID NO: 1480 - DNA, 17 bp, Homo sapiens
acagcgggactgcgggg

SEQ ID NO: 1481 - DNA, 21 bp, Homo sapiens
acagcggggctgggagcggcg

SEQ ID NO: 1482 - DNA, 20 bp, Homo sapiens
acagcggggtggacaagtgg

SEQ ID NO: 1483 - DNA, 18 bp, Homo sapiens
acagcggtggcgtctctg

SEQ ID NO: 1484 - DNA, 20 bp, Homo sapiens
acagcggtggctgccgggcg

SEQ ID NO: 1485 - DNA, 20 bp, Homo sapiens
acagcgtgaggtgacccatc

SEQ ID NO: 1486 - DNA, 22 bp, Homo sapiens
acagctcagagcagggaggccg

SEQ ID NO: 1487 - DNA, 18 bp, Homo sapiens
acagctcattgttggcag

SEQ ID NO: 1488 - DNA, 22 bp, Homo sapiens
acagctcattgttggcagctgc

SEQ ID NO: 1489 - DNA, 20 bp, Homo sapiens
acagctgcttcagtaagtat

SEQ ID NO: 1490 - DNA, 18 bp, Homo sapiens
acagctgggagcgcctgg

SEQ ID NO: 1491 - DNA, 17 bp, Homo sapiens
acagctggggagagaca

SEQ ID NO: 1492 - DNA, 24 bp, Homo sapiens
acagctggggccggtggctccgga

SEQ ID NO: 1493 - DNA, 17 bp, Homo sapiens
acagctgtgcggcctcc

SEQ ID NO: 1494 - DNA, 18 bp, Homo sapiens
acaggaaactggctagaa

SEQ ID NO: 1495 - DNA, 21 bp, Homo sapiens
acaggaaactggctagaagac

SEQ ID NO: 1496 - DNA, 18 bp, Homo sapiens
acaggaagagaagagccg

SEQ ID NO: 1497 - DNA, 18 bp, Homo sapiens
acaggaagagagaagctg

SEQ ID NO: 1498 - DNA, 22 bp, Homo sapiens
acaggaagaggctggggaccgc

SEQ ID NO: 1499 - DNA, 18 bp, Homo sapiens
acaggaaggttgagagag

SEQ ID NO: 1500 - DNA, 21 bp, Homo sapiens
acaggaaggttgagagagagg

SEQ ID NO: 1501 - DNA, 23 bp, Homo sapiens
acaggaaggttgagagagaggtg

SEQ ID NO: 1502 - DNA, 18 bp, Homo sapiens
acaggaccgggagagcag

SEQ ID NO: 1503 - DNA, 19 bp, Homo sapiens
acaggacgagcggaaatac

SEQ ID NO: 1504 - DNA, 18 bp, Homo sapiens
acaggactgaacagggag

SEQ ID NO: 1505 - DNA, 16 bp, Homo sapiens
acaggagcagcctccg

SEQ ID NO: 1506 - DNA, 17 bp, Homo sapiens
acaggagcagcctccgc

SEQ ID NO: 1507 - DNA, 20 bp, Homo sapiens
acaggagcctgcactctgcg

SEQ ID NO: 1508 - DNA, 17 bp, Homo sapiens
acaggcagggcgagcgc

SEQ ID NO: 1509 - DNA, 18 bp, Homo sapiens
acaggccgggcaccaagg

SEQ ID NO: 1510 - DNA, 18 bp, Homo sapiens
acaggccggtcgtggagc

SEQ ID NO: 1511 - DNA, 18 bp, Homo sapiens
acaggcgagcagggcagg

SEQ ID NO: 1512 - DNA, 16 bp, Homo sapiens
acaggctgagacgaga

SEQ ID NO: 1513 - DNA, 19 bp, Homo sapiens
acaggctgagacgagacgc

SEQ ID NO: 1514 - DNA, 18 bp, Homo sapiens
acagggattgccccccgc

SEQ ID NO: 1515 - DNA, 19 bp, Homo sapiens
acagggcgggagaagcggt

SEQ ID NO: 1516 - DNA, 21 bp, Homo sapiens
acaggggccacggggagagca

SEQ ID NO: 1517 - DNA, 17 bp, Homo sapiens
acaggtctgcaggcact

SEQ ID NO: 1518 - DNA, 18 bp, Homo sapiens
acaggtctgggaggcagt

SEQ ID NO: 1519 - DNA, 19 bp, Homo sapiens
acaggtctgggaggcagtt

SEQ ID NO: 1520 - DNA, 18 bp, Homo sapiens
acaggttgcgggcctttg

SEQ ID NO: 1521 - DNA, 16 bp, Homo sapiens
acagtcacgccgggct

SEQ ID NO: 1522 - DNA, 19 bp, Homo sapiens
acagtcatggcggcgactg

SEQ ID NO: 1523 - DNA, 24 bp, Homo sapiens
acagtccccatggtgggcagcccc

SEQ ID NO: 1524 - DNA, 19 bp, Homo sapiens
acagtcctggccctgctgg

SEQ ID NO: 1525 - DNA, 19 bp, Homo sapiens
acagtcgcacgcagccagg

SEQ ID NO: 1526 - DNA, 16 bp, Homo sapiens
acagtcggcggccgcg

SEQ ID NO: 1527 - DNA, 22 bp, Homo sapiens
acagtgaaaatgtagacggggt

SEQ ID NO: 1528 - DNA, 21 bp, Homo sapiens
acagtgcaggcgcccaagccg

SEQ ID NO: 1529 - DNA, 18 bp, Homo sapiens
acagtgcggaactaaagg

SEQ ID NO: 1530 - DNA, 22 bp, Homo sapiens
acagtgcggagaccgcagcccc

SEQ ID NO: 1531 - DNA, 18 bp, Homo sapiens
acagtgctgggatgacta

SEQ ID NO: 1532 - DNA, 18 bp, Homo sapiens
acagtgctgtcagaacgg

SEQ ID NO: 1533 - DNA, 16 bp, Homo sapiens
acagtggactacccga

SEQ ID NO: 1534 - DNA, 17 bp, Homo sapiens
gagcatgatggaagtcg

SEQ ID NO: 1535 - DNA, 16 bp, Homo sapiens
gagcatggacgacccc

SEQ ID NO: 1536 - DNA, 20 bp, Homo sapiens
gagcatgtagcggctgctgg

SEQ ID NO: 1537 - DNA, 19 bp, Homo sapiens
gagccaagatggcggctgc

SEQ ID NO: 1538 - DNA, 21 bp, Homo sapiens
gagccaagccagcatgtcggg

SEQ ID NO: 1539 - DNA, 18 bp, Homo sapiens
gagccacatggacggagc

SEQ ID NO: 1540 - DNA, 19 bp, Homo sapiens
gagccacggagccgcggca

SEQ ID NO: 1541 - DNA, 17 bp, Homo sapiens
gagccagcgggcgcggg

SEQ ID NO: 1542 - DNA, 19 bp, Homo sapiens
gagccagttgccggattat

SEQ ID NO: 1543 - DNA, 18 bp, Homo sapiens
gagccatggttgctggga

SEQ ID NO: 1544 - DNA, 21 bp, Homo sapiens
gagcccacttgagagcgcctc

SEQ ID NO: 1545 - DNA, 18 bp, Homo sapiens
gagcccagctacgcgacg

SEQ ID NO: 1546 - DNA, 21 bp, Homo sapiens
gagcccagctacgcgacgcgg

SEQ ID NO: 1547 - DNA, 18 bp, Homo sapiens
gagccccgggcgggggcg

SEQ ID NO: 1548 - DNA, 18 bp, Homo sapiens
gagcccgagccatgcgga

SEQ ID NO: 1549 - DNA, 16 bp, Homo sapiens
gagcccggcgatgcag

SEQ ID NO: 1550 - DNA, 24 bp, Homo sapiens
gagcccggcgatggcggctgcgcc

SEQ ID NO: 1551 - DNA, 20 bp, Homo sapiens
gagcccgggcccagcgccgc

SEQ ID NO: 1552 - DNA, 19 bp, Homo sapiens
gagcccggtgacaggatgg

SEQ ID NO: 1553 - DNA, 20 bp, Homo sapiens
gagccctgcgcgcgcgcctg

SEQ ID NO: 1554 - DNA, 16 bp, Homo sapiens
gagccgagacggtgca

SEQ ID NO: 1555 - DNA, 17 bp, Homo sapiens
gagccgcaaggaagtcg

SEQ ID NO: 1556 - DNA, 19 bp, Homo sapiens
gagccgcgcacgggactgg

SEQ ID NO: 1557 - DNA, 18 bp, Homo sapiens
gagccgcggacaccatgc

SEQ ID NO: 1558 - DNA, 18 bp, Homo sapiens
gagccgcggaggtgcagg

SEQ ID NO: 1559 - DNA, 18 bp, Homo sapiens
gagccgcgggatggaccg

SEQ ID NO: 1560 - DNA, 19 bp, Homo sapiens
gagccgctgccagcgctgg

SEQ ID NO: 1561 - DNA, 18 bp, Homo sapiens
gagccgctgccggagggt

SEQ ID NO: 1562 - DNA, 21 bp, Homo sapiens
gagccgctgccggagggtcgt

SEQ ID NO: 1563 - DNA, 18 bp, Homo sapiens
gagccggagctggaggtg

SEQ ID NO: 1564 - DNA, 17 bp, Homo sapiens
gagccggaggggacgcg

SEQ ID NO: 1565 - DNA, 20 bp, Homo sapiens
gagccggaggggacgcgccg

SEQ ID NO: 1566 - DNA, 21 bp, Homo sapiens
gagccggagtcggagtcggag

SEQ ID NO: 1567 - DNA, 18 bp, Homo sapiens
gagccggatgattgcctc

SEQ ID NO: 1568 - DNA, 19 bp, Homo sapiens
gagccggcgctgagagggg

SEQ ID NO: 1569 - DNA, 21 bp, Homo sapiens
gagccggcggcgctgcgggtc

SEQ ID NO: 1570 - DNA, 18 bp, Homo sapiens
gagccggcggcgggtggc

SEQ ID NO: 1571 - DNA, 17 bp, Homo sapiens
gagccgggctacggggc

SEQ ID NO: 1572 - DNA, 18 bp, Homo sapiens
gagccgggctgcgagccg

SEQ ID NO: 1573 - DNA, 20 bp, Homo sapiens
gagccgggggctctagtgaa

SEQ ID NO: 1574 - DNA, 18 bp, Homo sapiens
gagccgtgcgggtgactg

SEQ ID NO: 1575 - DNA, 21 bp, Homo sapiens
gagcctcggtactgtggcagc

SEQ ID NO: 1576 - DNA, 18 bp, Homo sapiens
gagcctgggaagtggccg

SEQ ID NO: 1577 - DNA, 18 bp, Homo sapiens
gagccttagccgacggaa

SEQ ID NO: 1578 - DNA, 13 bp, Homo sapiens
gagcgaacgggac

SEQ ID NO: 1579 - DNA, 16 bp, Homo sapiens
gagcgaagagaaccgg

SEQ ID NO: 1580 - DNA, 18 bp, Homo sapiens
gagcgaagagcggggctg

SEQ ID NO: 1581 - DNA, 18 bp, Homo sapiens
gagcgaaggctgctctgt

SEQ ID NO: 1582 - DNA, 18 bp, Homo sapiens
gagcgacaagccgctggc

SEQ ID NO: 1583 - DNA, 18 bp, Homo sapiens
gagcgacggcggaacccg

SEQ ID NO: 1584 - DNA, 19 bp, Homo sapiens
gagcgacgggcagaaatct

SEQ ID NO: 1585 - DNA, 18 bp, Homo sapiens
gagcgactagacgaacag

SEQ ID NO: 1586 - DNA, 21 bp, Homo sapiens
gagcgagaccaaaacaggtgg

SEQ ID NO: 1587 - DNA, 18 bp, Homo sapiens
gagcgagagagggaacca

SEQ ID NO: 1588 - DNA, 21 bp, Homo sapiens
gagcgagagtgagtggggccg

SEQ ID NO: 1589 - DNA, 22 bp, Homo sapiens
gagcgagccagttgccggatta

SEQ ID NO: 1590 - DNA, 18 bp, Homo sapiens
gagcgagcgaacgagcgg

SEQ ID NO: 1591 - DNA, 17 bp, Homo sapiens
acagtggactacccgat

SEQ ID NO: 1592 - DNA, 18 bp, Homo sapiens
acagttcactcagacacg

SEQ ID NO: 1593 - DNA, 20 bp, Homo sapiens
acagttgcgctgcccaggga

SEQ ID NO: 1594 - DNA, 16 bp, Homo sapiens
acagttgggtaaggat

SEQ ID NO: 1595 - DNA, 23 bp, Homo sapiens
acagttgggtgcatgcagaagta

SEQ ID NO: 1596 - DNA, 16 bp, Homo sapiens
acagtttgttgtgctc

SEQ ID NO: 1597 - DNA, 18 bp, Homo sapiens
acataaaagtttgtttca

SEQ ID NO: 1598 - DNA, 18 bp, Homo sapiens
acataaggtggctgtcgt

SEQ ID NO: 1599 - DNA, 22 bp, Homo sapiens
acatcagaggcttagaggcgag

SEQ ID NO: 1600 - DNA, 18 bp, Homo sapiens
acatcctctgaggtaggc

SEQ ID NO: 1601 - DNA, 17 bp, Homo sapiens
acatgacagcagatccg

SEQ ID NO: 1602 - DNA, 21 bp, Homo sapiens
acatgagttcagaggaagagg

SEQ ID NO: 1603 - DNA, 23 bp, Homo sapiens
acatgatctctagactgggacgg

SEQ ID NO: 1604 - DNA, 18 bp, Homo sapiens
acatgcgcgctgtcctgg

SEQ ID NO: 1605 - DNA, 18 bp, Homo sapiens
acatggcggagctgacgg

SEQ ID NO: 1606 - DNA, 18 bp, Homo sapiens
acatggcggatcggctca

SEQ ID NO: 1607 - DNA, 17 bp, Homo sapiens
acatggcggccggcccc

SEQ ID NO: 1608 - DNA, 18 bp, Homo sapiens
acatggcggcgactgcgg

SEQ ID NO: 1609 - DNA, 17 bp, Homo sapiens
acatggcggcgcccagc

SEQ ID NO: 1610 - DNA, 19 bp, Homo sapiens
acatgtctggtcgcggcaa

SEQ ID NO: 1611 - DNA, 21 bp, Homo sapiens
acattcactgggcaagccgac

SEQ ID NO: 1612 - DNA, 19 bp, Homo sapiens
acattcaggtgcggactcg

SEQ ID NO: 1613 - DNA, 20 bp, Homo sapiens
acattcctggttaatgactc

SEQ ID NO: 1614 - DNA, 17 bp, Homo sapiens
acattgatcatcgacac

SEQ ID NO: 1615 - DNA, 18 bp, Homo sapiens
acattgatcatcgacact

SEQ ID NO: 1616 - DNA, 23 bp, Homo sapiens
acattgatcatcgacacttcgaa

SEQ ID NO: 1617 - DNA, 24 bp, Homo sapiens
acattgatcatcgacacttcgaac

SEQ ID NO: 1618 - DNA, 18 bp, Homo sapiens
accaaaacaaaggagcgg

SEQ ID NO: 1619 - DNA, 20 bp, Homo sapiens
accaaaatggcgaggggctg

SEQ ID NO: 1620 - DNA, 17 bp, Homo sapiens
accaagaggaaacggcg

SEQ ID NO: 1621 - DNA, 18 bp, Homo sapiens
accaagaggaacagaaca

SEQ ID NO: 1622 - DNA, 18 bp, Homo sapiens
accaagaggcaacgggcg

SEQ ID NO: 1623 - DNA, 19 bp, Homo sapiens
accaagaggcttgggagtc

SEQ ID NO: 1624 - DNA, 18 bp, Homo sapiens
accaagatggcggcgccc

SEQ ID NO: 1625 - DNA, 19 bp, Homo sapiens
accaagcaagatggcagct

SEQ ID NO: 1626 - DNA, 18 bp, Homo sapiens
accaagtcgaggtaaggg

SEQ ID NO: 1627 - DNA, 18 bp, Homo sapiens
accaatcgggcggagggg

SEQ ID NO: 1628 - DNA, 18 bp, Homo sapiens
accacaataacaggcgga

SEQ ID NO: 1629 - DNA, 17 bp, Homo sapiens
accacaggctgagacga

SEQ ID NO: 1630 - DNA, 18 bp, Homo sapiens
accacattcagcggctgc

SEQ ID NO: 1631 - DNA, 15 bp, Homo sapiens
accaccggcgtgcgt

SEQ ID NO: 1632 - DNA, 16 bp, Homo sapiens
accacgggccgaggcc

SEQ ID NO: 1633 - DNA, 18 bp, Homo sapiens
accactgcagaccacggg

SEQ ID NO: 1634 - DNA, 18 bp, Homo sapiens
accagccgttcgatcccg

SEQ ID NO: 1635 - DNA, 18 bp, Homo sapiens
accagcgcgacgagggcg

SEQ ID NO: 1636 - DNA, 19 bp, Homo sapiens
accaggaggaagacggagc

SEQ ID NO: 1637 - DNA, 21 bp, Homo sapiens
accagggtcgcgccgagaggc

SEQ ID NO: 1638 - DNA, 17 bp, Homo sapiens
accagtatgtctggacg

SEQ ID NO: 1639 - DNA, 19 bp, Homo sapiens
accagtcgggtttggtttt

SEQ ID NO: 1640 - DNA, 18 bp, Homo sapiens
accagtcggtagagggtg

SEQ ID NO: 1641 - DNA, 20 bp, Homo sapiens
accagtcggtagagggtgag

SEQ ID NO: 1642 - DNA, 17 bp, Homo sapiens
accagttggcgacatgg

SEQ ID NO: 1643 - DNA, 18 bp, Homo sapiens
accatgacggaactagag

SEQ ID NO: 1644 - DNA, 22 bp, Homo sapiens
accatgatttcggccgcgcagt

SEQ ID NO: 1645 - DNA, 24 bp, Homo sapiens
accatggacgctgaaggtaaaggg

SEQ ID NO: 1646 - DNA, 19 bp, Homo sapiens
accatggcggcccggcttg

SEQ ID NO: 1647 - DNA, 18 bp, Homo sapiens
accatgtggctggaggcg

SEQ ID NO: 1648 - DNA, 22 bp, Homo sapiens
gagcgagcgggcgtgcggagcg

SEQ ID NO: 1649 - DNA, 18 bp, Homo sapiens
gagcgagcgttcggacct

SEQ ID NO: 1650 - DNA, 18 bp, Homo sapiens
gagcgagctgagtggttg

SEQ ID NO: 1651 - DNA, 17 bp, Homo sapiens
gagcgaggcgcgtcgca

SEQ ID NO: 1652 - DNA, 18 bp, Homo sapiens
gagcgagttgccgggcga

SEQ ID NO: 1653 - DNA, 19 bp, Homo sapiens
gagcgatcgagggagctga

SEQ ID NO: 1654 - DNA, 18 bp, Homo sapiens
gagcgatggcggtacgcg

SEQ ID NO: 1655 - DNA, 18 bp, Homo sapiens
gagcgcagagcggtttgg

SEQ ID NO: 1656 - DNA, 20 bp, Homo sapiens
gagcgcagatcgcggacccg

SEQ ID NO: 1657 - DNA, 18 bp, Homo sapiens
gagcgcaggaggaaacag

SEQ ID NO: 1658 - DNA, 18 bp, Homo sapiens
gagcgcataatgttatga

SEQ ID NO: 1659 - DNA, 17 bp, Homo sapiens
gagcgccgcgtgggggc

SEQ ID NO: 1660 - DNA, 20 bp, Homo sapiens
gagcgccggagaggggctgg

SEQ ID NO: 1661 - DNA, 18 bp, Homo sapiens
gagcgccggaggagcgta

SEQ ID NO: 1662 - DNA, 20 bp, Homo sapiens
gagcgccgggcgtaaggcaa

SEQ ID NO: 1663 - DNA, 21 bp, Homo sapiens
gagcgcgctagtcagctccct

SEQ ID NO: 1664 - DNA, 17 bp, Homo sapiens
gagcgcggactggccgg

SEQ ID NO: 1665 - DNA, 17 bp, Homo sapiens
gagcgcggcccctgggt

SEQ ID NO: 1666 - DNA, 18 bp, Homo sapiens
gagcgcggccgagtgggg

SEQ ID NO: 1667 - DNA, 17 bp, Homo sapiens
gagcgcggccgggacgg

SEQ ID NO: 1668 - DNA, 16 bp, Homo sapiens
gagcgcggcgcggcgc

SEQ ID NO: 1669 - DNA, 19 bp, Homo sapiens
gagcgcggcggcggcggga

SEQ ID NO: 1670 - DNA, 18 bp, Homo sapiens
gagcgcggcgtggaggtg

SEQ ID NO: 1671 - DNA, 18 bp, Homo sapiens
gagcgcgggactagagtg

SEQ ID NO: 1672 - DNA, 18 bp, Homo sapiens
gagcgcgggagctgcctc

SEQ ID NO: 1673 - DNA, 18 bp, Homo sapiens
gagcgcggtcaccggacg

SEQ ID NO: 1674 - DNA, 18 bp, Homo sapiens
gagcgctagggctccgag

SEQ ID NO: 1675 - DNA, 21 bp, Homo sapiens
gagcgctagggctccgagcga

SEQ ID NO: 1676 - DNA, 18 bp, Homo sapiens
gagcgctaggtcggtgta

SEQ ID NO: 1677 - DNA, 17 bp, Homo sapiens
gagcgctctcactcgca

SEQ ID NO: 1678 - DNA, 18 bp, Homo sapiens
gagcgctggtggcggagt

SEQ ID NO: 1679 - DNA, 19 bp, Homo sapiens
gagcggacaaacggaagtg

SEQ ID NO: 1680 - DNA, 18 bp, Homo sapiens
gagcggacgctgcatccc

SEQ ID NO: 1681 - DNA, 17 bp, Homo sapiens
gagcggacggcaaagaa

SEQ ID NO: 1682 - DNA, 18 bp, Homo sapiens
gagcggactgctagaggc

SEQ ID NO: 1683 - DNA, 19 bp, Homo sapiens
gagcggagcgcctgggcgg

SEQ ID NO: 1684 - DNA, 17 bp, Homo sapiens
gagcggagcggagctgt

SEQ ID NO: 1685 - DNA, 18 bp, Homo sapiens
gagcggagcggagctgtg

SEQ ID NO: 1686 - DNA, 19 bp, Homo sapiens
gagcggaggccgaggcgag

SEQ ID NO: 1687 - DNA, 16 bp, Homo sapiens
gagcggaggcgggcgc

SEQ ID NO: 1688 - DNA, 19 bp, Homo sapiens
gagcggagtggccttgcca

SEQ ID NO: 1689 - DNA, 17 bp, Homo sapiens
gagcggagttagcaggg

SEQ ID NO: 1690 - DNA, 20 bp, Homo sapiens
gagcggcagcgcggtcagtg

SEQ ID NO: 1691 - DNA, 17 bp, Homo sapiens
gagcggccgcctctccc

SEQ ID NO: 1692 - DNA, 18 bp, Homo sapiens
gagcggccgggctggcta

SEQ ID NO: 1693 - DNA, 17 bp, Homo sapiens
gagcggcgccggccctt

SEQ ID NO: 1694 - DNA, 23 bp, Homo sapiens
gagcggcggatctggacacccag

SEQ ID NO: 1695 - DNA, 17 bp, Homo sapiens
gagcggcgggagcgagg

SEQ ID NO: 1696 - DNA, 16 bp, Homo sapiens
gagcgggaaggtaggt

SEQ ID NO: 1697 - DNA, 18 bp, Homo sapiens
gagcgggaaggtaggtaa

SEQ ID NO: 1698 - DNA, 20 bp, Homo sapiens
gagcgggaaggtaggtaacg

SEQ ID NO: 1699 - DNA, 17 bp, Homo sapiens
gagcgggacagggacaa

SEQ ID NO: 1700 - DNA, 17 bp, Homo sapiens
gagcgggactcggcggc

SEQ ID NO: 1701 - DNA, 17 bp, Homo sapiens
gagcgggagggagaagc

SEQ ID NO: 1702 - DNA, 21 bp, Homo sapiens
gagcgggagggggccgccctc

SEQ ID NO: 1703 - DNA, 17 bp, Homo sapiens
gagcgggattgtttcgc

SEQ ID NO: 1704 - DNA, 19 bp, Homo sapiens
gagcgggcagcggaggagg

SEQ ID NO: 1705 - DNA, 19 bp, Homo sapiens
accattgctcagcccgcag

SEQ ID NO: 1706 - DNA, 20 bp, Homo sapiens
acccaacaacaaaacagcga

SEQ ID NO: 1707 - DNA, 18 bp, Homo sapiens
acccaatatggcagcggc

SEQ ID NO: 1708 - DNA, 18 bp, Homo sapiens
acccactggacgttggca

SEQ ID NO: 1709 - DNA, 19 bp, Homo sapiens
acccactggacgttggcac

SEQ ID NO: 1710 - DNA, 18 bp, Homo sapiens
acccagagctaccatgag

SEQ ID NO: 1711 - DNA, 19 bp, Homo sapiens
acccagcaggcggcgaaga

SEQ ID NO: 1712 - DNA, 18 bp, Homo sapiens
acccagcatggcggactc

SEQ ID NO: 1713 - DNA, 20 bp, Homo sapiens
acccaggctgcgggacgcgg

SEQ ID NO: 1714 - DNA, 17 bp, Homo sapiens
acccatggatcgcagcg

SEQ ID NO: 1715 - DNA, 20 bp, Homo sapiens
accccacccaccccccccgc

SEQ ID NO: 1716 - DNA, 23 bp, Homo sapiens
accccagcggccggatggtgaaa

SEQ ID NO: 1717 - DNA, 18 bp, Homo sapiens
accccaggcaccggcccg

SEQ ID NO: 1718 - DNA, 15 bp, Homo sapiens
accccctcgcggccc

SEQ ID NO: 1719 - DNA, 22 bp, Homo sapiens
accccgatgggtgggacggggg

SEQ ID NO: 1720 - DNA, 21 bp, Homo sapiens
accccgctccggatccgggat

SEQ ID NO: 1721 - DNA, 19 bp, Homo sapiens
accccggcctggaactgcc

SEQ ID NO: 1722 - DNA, 23 bp, Homo sapiens
accccggcggcggctggagagcg

SEQ ID NO: 1723 - DNA, 17 bp, Homo sapiens
accccgggacatctgaa

SEQ ID NO: 1724 - DNA, 18 bp, Homo sapiens
acccctcatggccaaccg

SEQ ID NO: 1725 - DNA, 18 bp, Homo sapiens
acccctgctgatctcctc

SEQ ID NO: 1726 - DNA, 17 bp, Homo sapiens
acccgacaagctgagtg

SEQ ID NO: 1727 - DNA, 17 bp, Homo sapiens
acccgacccgacgccgg

SEQ ID NO: 1728 - DNA, 16 bp, Homo sapiens
acccgagcgagcagac

SEQ ID NO: 1729 - DNA, 19 bp, Homo sapiens
acccgagctcatactaggg

SEQ ID NO: 1730 - DNA, 20 bp, Homo sapiens
acccgaggccacgccccaga

SEQ ID NO: 1731 - DNA, 20 bp, Homo sapiens
acccgcagagctctcggact

SEQ ID NO: 1732 - DNA, 16 bp, Homo sapiens
acccgcgaggagtcgc

SEQ ID NO: 1733 - DNA, 18 bp, Homo sapiens
acccgcggctgggcgcct

SEQ ID NO: 1734 - DNA, 19 bp, Homo sapiens
acccgctccaggtccggga

SEQ ID NO: 1735 - DNA, 20 bp, Homo sapiens
acccgctccaggtccgggac

SEQ ID NO: 1736 - DNA, 20 bp, Homo sapiens
acccgctgcggagtgaacgg

SEQ ID NO: 1737 - DNA, 22 bp, Homo sapiens
acccgctgcggagtgaacggtg

SEQ ID NO: 1738 - DNA, 17 bp, Homo sapiens
acccggaccctaagaag

SEQ ID NO: 1739 - DNA, 16 bp, Homo sapiens
acccggacggagggcc

SEQ ID NO: 1740 - DNA, 18 bp, Homo sapiens
acccggaggtgcgcgggc

SEQ ID NO: 1741 - DNA, 19 bp, Homo sapiens
acccggaggtgcgcgggcg

SEQ ID NO: 1742 - DNA, 17 bp, Homo sapiens
acccggatcggcaacag

SEQ ID NO: 1743 - DNA, 19 bp, Homo sapiens
acccggcagcctggacggg

SEQ ID NO: 1744 - DNA, 18 bp, Homo sapiens
acccggcggcgactgaaa

SEQ ID NO: 1745 - DNA, 21 bp, Homo sapiens
acccgggaagaaagcacgtgc

SEQ ID NO: 1746 - DNA, 18 bp, Homo sapiens
acccgggcggcgagatgg

SEQ ID NO: 1747 - DNA, 17 bp, Homo sapiens
acccgggtgagaggttc

SEQ ID NO: 1748 - DNA, 17 bp, Homo sapiens
acccggtgtcgccgcag

SEQ ID NO: 1749 - DNA, 18 bp, Homo sapiens
accctaagatctggcctg

SEQ ID NO: 1750 - DNA, 20 bp, Homo sapiens
accctacggtcccgacccgc

SEQ ID NO: 1751 - DNA, 19 bp, Homo sapiens
accctcagaaagtcagagt

SEQ ID NO: 1752 - DNA, 21 bp, Homo sapiens
accctcggggagcaacatggg

SEQ ID NO: 1753 - DNA, 17 bp, Homo sapiens
accctcttcgtcgcttc

SEQ ID NO: 1754 - DNA, 19 bp, Homo sapiens
acccttttcttccgcacgg

SEQ ID NO: 1755 - DNA, 20 bp, Homo sapiens
accgaaacccagagacctcc

SEQ ID NO: 1756 - DNA, 21 bp, Homo sapiens
accgaagactgcgatggtgag

SEQ ID NO: 1757 - DNA, 20 bp, Homo sapiens
accgacagcaaggcatggac

SEQ ID NO: 1758 - DNA, 19 bp, Homo sapiens
accgacgggaccgagcgag

SEQ ID NO: 1759 - DNA, 18 bp, Homo sapiens
accgactcctttccaggt

SEQ ID NO: 1760 - DNA, 18 bp, Homo sapiens
accgactgacggtaggga

SEQ ID NO: 1761 - DNA, 16 bp, Homo sapiens
accgactggcggagca

SEQ ID NO: 1762 - DNA, 18 bp, Homo sapiens
gagcgggcggcggagcgg

SEQ ID NO: 1763 - DNA, 17 bp, Homo sapiens
gagcggggaaaacaaaa

SEQ ID NO: 1764 - DNA, 23 bp, Homo sapiens
gagcggggcctctccgggccgcg

SEQ ID NO: 1765 - DNA, 19 bp, Homo sapiens
gagcgggtctgggcggctg

SEQ ID NO: 1766 - DNA, 23 bp, Homo sapiens
gagcgggtgcgggtgcgggcgca

SEQ ID NO: 1767 - DNA, 16 bp, Homo sapiens
gagcgggtgctacgtc

SEQ ID NO: 1768 - DNA, 18 bp, Homo sapiens
gagcggtaactaccccgg

SEQ ID NO: 1769 - DNA, 20 bp, Homo sapiens
gagcggtgctcatggcgctc

SEQ ID NO: 1770 - DNA, 19 bp, Homo sapiens
gagcggtggcgtctccccg

SEQ ID NO: 1771 - DNA, 20 bp, Homo sapiens
gagcggtgggaggcgagtcc

SEQ ID NO: 1772 - DNA, 16 bp, Homo sapiens
gagcggtggtttggac

SEQ ID NO: 1773 - DNA, 18 bp, Homo sapiens
gagcggtgtggagaagac

SEQ ID NO: 1774 - DNA, 23 bp, Homo sapiens
gagcgtcccgactcccggtgccg

SEQ ID NO: 1775 - DNA, 16 bp, Homo sapiens
gagcgtccgggagcag

SEQ ID NO: 1776 - DNA, 18 bp, Homo sapiens
gagcgtcgtgtggcagag

SEQ ID NO: 1777 - DNA, 18 bp, Homo sapiens
gagcgtgcaaccctagaa

SEQ ID NO: 1778 - DNA, 21 bp, Homo sapiens
gagcgtggacctgggacgggt

SEQ ID NO: 1779 - DNA, 19 bp, Homo sapiens
gagcgttctgtggagagag

SEQ ID NO: 1780 - DNA, 18 bp, Homo sapiens
gagcgttggcctttggca

SEQ ID NO: 1781 - DNA, 18 bp, Homo sapiens
gagctaccggggacactg

SEQ ID NO: 1782 - DNA, 22 bp, Homo sapiens
gagctacgtagggcagagaagt

SEQ ID NO: 1783 - DNA, 18 bp, Homo sapiens
gagctagtggactagagc

SEQ ID NO: 1784 - DNA, 20 bp, Homo sapiens
gagctcaggaacggacagga

SEQ ID NO: 1785 - DNA, 18 bp, Homo sapiens
gagctcctcggtcggtgc

SEQ ID NO: 1786 - DNA, 18 bp, Homo sapiens
gagctcctgggcaggctc

SEQ ID NO: 1787 - DNA, 17 bp, Homo sapiens
gagctcgccactcctta

SEQ ID NO: 1788 - DNA, 19 bp, Homo sapiens
gagctcggggctgcgtagg

SEQ ID NO: 1789 - DNA, 17 bp, Homo sapiens
gagctcggggcttggag

SEQ ID NO: 1790 - DNA, 22 bp, Homo sapiens
gagctctcatttcctcccagcc

SEQ ID NO: 1791 - DNA, 18 bp, Homo sapiens
gagctgacggtggaggtt

SEQ ID NO: 1792 - DNA, 21 bp, Homo sapiens
gagctgagagctggaggtgag

SEQ ID NO: 1793 - DNA, 22 bp, Homo sapiens
gagctgagcagtcaagatggtg

SEQ ID NO: 1794 - DNA, 18 bp, Homo sapiens
gagctgaggccgcgcggg

SEQ ID NO: 1795 - DNA, 19 bp, Homo sapiens
gagctgatcgcaagactag

SEQ ID NO: 1796 - DNA, 20 bp, Homo sapiens
gagctgcagaggattcctgc

SEQ ID NO: 1797 - DNA, 18 bp, Homo sapiens
gagctgccgccattttgc

SEQ ID NO: 1798 - DNA, 21 bp, Homo sapiens
gagctggagaatgaggcgtgc

SEQ ID NO: 1799 - DNA, 17 bp, Homo sapiens
gagctggagactagcgt

SEQ ID NO: 1800 - DNA, 20 bp, Homo sapiens
gagctggagagaggactgtc

SEQ ID NO: 1801 - DNA, 19 bp, Homo sapiens
gagctggagccgacgcgtg

SEQ ID NO: 1802 - DNA, 16 bp, Homo sapiens
gagctggcggcagtga

SEQ ID NO: 1803 - DNA, 22 bp, Homo sapiens
gagctggctgagaggggactgg

SEQ ID NO: 1804 - DNA, 18 bp, Homo sapiens
gagctgggagcgggtgac

SEQ ID NO: 1805 - DNA, 18 bp, Homo sapiens
gagctgggcgcggattcg

SEQ ID NO: 1806 - DNA, 18 bp, Homo sapiens
gagctgggctccaatttc

SEQ ID NO: 1807 - DNA, 16 bp, Homo sapiens
gagctgggggaaacga

SEQ ID NO: 1808 - DNA, 23 bp, Homo sapiens
gagctgggggacgggagacgccc

SEQ ID NO: 1809 - DNA, 17 bp, Homo sapiens
gagctggtggaccgggc

SEQ ID NO: 1810 - DNA, 17 bp, Homo sapiens
gagctgtacgaacgcgg

SEQ ID NO: 1811 - DNA, 20 bp, Homo sapiens
gagctgtatgaagagagcag

SEQ ID NO: 1812 - DNA, 19 bp, Homo sapiens
gagctgtcaccaccgacac

SEQ ID NO: 1813 - DNA, 18 bp, Homo sapiens
gagctgtccgcccagggc

SEQ ID NO: 1814 - DNA, 18 bp, Homo sapiens
gagctgtcgcggaccctg

SEQ ID NO: 1815 - DNA, 20 bp, Homo sapiens
gagctgtgctgagcgggtgt

SEQ ID NO: 1816 - DNA, 21 bp, Homo sapiens
gagcttcaagttccgcagccc

SEQ ID NO: 1817 - DNA, 16 bp, Homo sapiens
gagcttccggcagccc

SEQ ID NO: 1818 - DNA, 22 bp, Homo sapiens
gagcttgatgaggaagagcagc

SEQ ID NO: 1819 - DNA, 17 bp, Homo sapiens
accgactggcggagcac

SEQ ID NO: 1820 - DNA, 18 bp, Homo sapiens
accgagaagccgggaccg

SEQ ID NO: 1821 - DNA, 19 bp, Homo sapiens
accgagagagagccgtcct

SEQ ID NO: 1822 - DNA, 19 bp, Homo sapiens
accgagaggaactacagcg

SEQ ID NO: 1823 - DNA, 18 bp, Homo sapiens
accgagcgagcggaggga

SEQ ID NO: 1824 - DNA, 19 bp, Homo sapiens
accgagcggagaggagatg

SEQ ID NO: 1825 - DNA, 18 bp, Homo sapiens
accgagcggagttgtgcg

SEQ ID NO: 1826 - DNA, 20 bp, Homo sapiens
accgagcggagttgtgcgtg

SEQ ID NO: 1827 - DNA, 24 bp, Homo sapiens
accgagcggcctctgaggagcagc

SEQ ID NO: 1828 - DNA, 18 bp, Homo sapiens
accgagctgacgggcgtg

SEQ ID NO: 1829 - DNA, 20 bp, Homo sapiens
accgaggcactcagaggagg

SEQ ID NO: 1830 - DNA, 17 bp, Homo sapiens
accgaggggaggacgac

SEQ ID NO: 1831 - DNA, 17 bp, Homo sapiens
accgaggggcggacgcg

SEQ ID NO: 1832 - DNA, 18 bp, Homo sapiens
accgagggggctcggcca

SEQ ID NO: 1833 - DNA, 18 bp, Homo sapiens
accgagtggcagggcggc

SEQ ID NO: 1834 - DNA, 18 bp, Homo sapiens
accgagttggagtacgag

SEQ ID NO: 1835 - DNA, 19 bp, Homo sapiens
accgcaaggagtagcggag

SEQ ID NO: 1836 - DNA, 19 bp, Homo sapiens
accgcagagcccggacgag

SEQ ID NO: 1837 - DNA, 19 bp, Homo sapiens
accgcagaggtgagagtcg

SEQ ID NO: 1838 - DNA, 17 bp, Homo sapiens
accgcagccgcctgcaa

SEQ ID NO: 1839 - DNA, 19 bp, Homo sapiens
accgcagcggccaggaacg

SEQ ID NO: 1840 - DNA, 23 bp, Homo sapiens
accgcagggcctatcagcctgtc

SEQ ID NO: 1841 - DNA, 17 bp, Homo sapiens
accgcaggtaaccagcc

SEQ ID NO: 1842 - DNA, 18 bp, Homo sapiens
accgcaggtcgaggacgg

SEQ ID NO: 1843 - DNA, 17 bp, Homo sapiens
accgcaggtgaggccga

SEQ ID NO: 1844 - DNA, 20 bp, Homo sapiens
accgcagtctggttggagct

SEQ ID NO: 1845 - DNA, 18 bp, Homo sapiens
accgcagttgactagcac

SEQ ID NO: 1846 - DNA, 17 bp, Homo sapiens
accgccagcgcgaccat

SEQ ID NO: 1847 - DNA, 20 bp, Homo sapiens
accgcccactcttacccccg

SEQ ID NO: 1848 - DNA, 18 bp, Homo sapiens
accgccgacggagacccg

SEQ ID NO: 1849 - DNA, 17 bp, Homo sapiens
accgccgaggaaaaccg

SEQ ID NO: 1850 - DNA, 19 bp, Homo sapiens
accgccgaggaaaaccgtg

SEQ ID NO: 1851 - DNA, 17 bp, Homo sapiens
accgccgccagggccgc

SEQ ID NO: 1852 - DNA, 19 bp, Homo sapiens
accgccgccgccatagaga

SEQ ID NO: 1853 - DNA, 18 bp, Homo sapiens
accgccgccggtcgggcg

SEQ ID NO: 1854 - DNA, 19 bp, Homo sapiens
accgccgctgggggaccct

SEQ ID NO: 1855 - DNA, 20 bp, Homo sapiens
accgccggtgcacgttggag

SEQ ID NO: 1856 - DNA, 20 bp, Homo sapiens
accgccgtccgcgcctccaa

SEQ ID NO: 1857 - DNA, 19 bp, Homo sapiens
accgcctcccgcgcacaca

SEQ ID NO: 1858 - DNA, 16 bp, Homo sapiens
accgcgcgggacggag

SEQ ID NO: 1859 - DNA, 18 bp, Homo sapiens
accgcgcgggacggagct

SEQ ID NO: 1860 - DNA, 17 bp, Homo sapiens
accgcgctgacgaagtt

SEQ ID NO: 1861 - DNA, 17 bp, Homo sapiens
accgcggaggacagggg

SEQ ID NO: 1862 - DNA, 18 bp, Homo sapiens
accgcggaggacaggggc

SEQ ID NO: 1863 - DNA, 19 bp, Homo sapiens
accgcggaggacaggggca

SEQ ID NO: 1864 - DNA, 20 bp, Homo sapiens
accgcggaggacaggggcag

SEQ ID NO: 1865 - DNA, 21 bp, Homo sapiens
accgcggaggacaggggcagc

SEQ ID NO: 1866 - DNA, 19 bp, Homo sapiens
accgcggatggcaagagac

SEQ ID NO: 1867 - DNA, 18 bp, Homo sapiens
accgcggcaaagtaactt

SEQ ID NO: 1868 - DNA, 19 bp, Homo sapiens
accgcggcaggacggggag

SEQ ID NO: 1869 - DNA, 18 bp, Homo sapiens
accgcggcctgtgacgcg

SEQ ID NO: 1870 - DNA, 17 bp, Homo sapiens
accgcggctgcaggaac

SEQ ID NO: 1871 - DNA, 18 bp, Homo sapiens
accgcgggatgctgtctg

SEQ ID NO: 1872 - DNA, 17 bp, Homo sapiens
accgcgggtagcgaaag

SEQ ID NO: 1873 - DNA, 17 bp, Homo sapiens
accgcggtgagtggcgg

SEQ ID NO: 1874 - DNA, 17 bp, Homo sapiens
accgcggttcctgggca

SEQ ID NO: 1875 - DNA, 19 bp, Homo sapiens
accgcgtccgccccgcgag

SEQ ID NO: 1876 - DNA, 18 bp, Homo sapiens
gagcttgggaggtaggag

SEQ ID NO: 1877 - DNA, 20 bp, Homo sapiens
gaggaaacggcgtggaggct

SEQ ID NO: 1878 - DNA, 22 bp, Homo sapiens
gaggaaagcgggaagactcatc

SEQ ID NO: 1879 - DNA, 18 bp, Homo sapiens
gaggaaatactccgcgtg

SEQ ID NO: 1880 - DNA, 17 bp, Homo sapiens
gaggaaatgcggagccg

SEQ ID NO: 1881 - DNA, 19 bp, Homo sapiens
gaggaaatgcggagccgcg

SEQ ID NO: 1882 - DNA, 18 bp, Homo sapiens
gaggaaccgcgagacccc

SEQ ID NO: 1883 - DNA, 18 bp, Homo sapiens
gaggaagacggagctggc

SEQ ID NO: 1884 - DNA, 18 bp, Homo sapiens
gaggaagagaggaaacgg

SEQ ID NO: 1885 - DNA, 20 bp, Homo sapiens
gaggaagatgaacagcccca

SEQ ID NO: 1886 - DNA, 17 bp, Homo sapiens
gaggaagatgcgaccgg

SEQ ID NO: 1887 - DNA, 19 bp, Homo sapiens
gaggaagatgcgaccggca

SEQ ID NO: 1888 - DNA, 17 bp, Homo sapiens
gaggaagatggactcgg

SEQ ID NO: 1889 - DNA, 17 bp, Homo sapiens
gaggaagcacagcagca

SEQ ID NO: 1890 - DNA, 18 bp, Homo sapiens
gaggaagcccagtacatt

SEQ ID NO: 1891 - DNA, 19 bp, Homo sapiens
gaggaagcttgggggacgc

SEQ ID NO: 1892 - DNA, 18 bp, Homo sapiens
gaggaaggaggcgaactg

SEQ ID NO: 1893 - DNA, 19 bp, Homo sapiens
gaggaaggaggcgaactgt

SEQ ID NO: 1894 - DNA, 16 bp, Homo sapiens
gaggaaggcgcttccg

SEQ ID NO: 1895 - DNA, 20 bp, Homo sapiens
gaggaaggctgtagtgtcgg

SEQ ID NO: 1896 - DNA, 18 bp, Homo sapiens
gaggaaggggcggagctg

SEQ ID NO: 1897 - DNA, 22 bp, Homo sapiens
gaggaaggtggcaagatggtgt

SEQ ID NO: 1898 - DNA, 20 bp, Homo sapiens
gaggaagtgcctgcgcgggg

SEQ ID NO: 1899 - DNA, 18 bp, Homo sapiens
gaggaagtggtagcacta

SEQ ID NO: 1900 - DNA, 18 bp, Homo sapiens
gaggaagttggctggttg

SEQ ID NO: 1901 - DNA, 19 bp, Homo sapiens
gaggacaaagaccagggcc

SEQ ID NO: 1902 - DNA, 20 bp, Homo sapiens
gaggacaaggaaaatgcatg

SEQ ID NO: 1903 - DNA, 18 bp, Homo sapiens
gaggacacggcggccgag

SEQ ID NO: 1904 - DNA, 19 bp, Homo sapiens
gaggacacggtgactggtt

SEQ ID NO: 1905 - DNA, 18 bp, Homo sapiens
gaggaccaggccgtccag

SEQ ID NO: 1906 - DNA, 17 bp, Homo sapiens
gaggaccctagtccaac

SEQ ID NO: 1907 - DNA, 17 bp, Homo sapiens
gaggaccggcaacatgg

SEQ ID NO: 1908 - DNA, 17 bp, Homo sapiens
gaggacgaaaaaaataa

SEQ ID NO: 1909 - DNA, 18 bp, Homo sapiens
gaggacgaaaaaaataac

SEQ ID NO: 1910 - DNA, 20 bp, Homo sapiens
gaggacgaaaaaaataaccg

SEQ ID NO: 1911 - DNA, 18 bp, Homo sapiens
gaggacgaagcaggacct

SEQ ID NO: 1912 - DNA, 18 bp, Homo sapiens
gaggacgccgtacccctc

SEQ ID NO: 1913 - DNA, 17 bp, Homo sapiens
gaggacgcgaggccccg

SEQ ID NO: 1914 - DNA, 18 bp, Homo sapiens
gaggacgcggaggacgag

SEQ ID NO: 1915 - DNA, 16 bp, Homo sapiens
gaggacgcggggggcg

SEQ ID NO: 1916 - DNA, 17 bp, Homo sapiens
gaggacggagaggcgga

SEQ ID NO: 1917 - DNA, 19 bp, Homo sapiens
gaggacggcgccaagggcc

SEQ ID NO: 1918 - DNA, 20 bp, Homo sapiens
gaggacggcgccaagggcct

SEQ ID NO: 1919 - DNA, 18 bp, Homo sapiens
gaggacggcgtggacggg

SEQ ID NO: 1920 - DNA, 17 bp, Homo sapiens
gaggacggcgttatttt

SEQ ID NO: 1921 - DNA, 18 bp, Homo sapiens
gaggacggctcaggagca

SEQ ID NO: 1922 - DNA, 16 bp, Homo sapiens
gaggacgggcggtcgc

SEQ ID NO: 1923 - DNA, 21 bp, Homo sapiens
gaggacgggggagtgcgactg

SEQ ID NO: 1924 - DNA, 17 bp, Homo sapiens
gaggacggtgagacggc

SEQ ID NO: 1925 - DNA, 18 bp, Homo sapiens
gaggacgtggaggcgcgc

SEQ ID NO: 1926 - DNA, 17 bp, Homo sapiens
gaggactactacgggag

SEQ ID NO: 1927 - DNA, 18 bp, Homo sapiens
gaggactactacgggagc

SEQ ID NO: 1928 - DNA, 19 bp, Homo sapiens
gaggactactacgggagcg

SEQ ID NO: 1929 - DNA, 19 bp, Homo sapiens
gaggactagcgaggaggag

SEQ ID NO: 1930 - DNA, 20 bp, Homo sapiens
gaggactagcgaggaggagt

SEQ ID NO: 1931 - DNA, 17 bp, Homo sapiens
gaggactgcggtgcccc

SEQ ID NO: 1932 - DNA, 19 bp, Homo sapiens
gaggactggaagggtggag

SEQ ID NO: 1933 - DNA, 22 bp, Homo sapiens
accgcgttggctgggtggcctc

SEQ ID NO: 1934 - DNA, 18 bp, Homo sapiens
accgctgacgcatgcctg

SEQ ID NO: 1935 - DNA, 17 bp, Homo sapiens
accggaaattagtcgaa

SEQ ID NO: 1936 - DNA, 18 bp, Homo sapiens
accggaagacgcttcctg

SEQ ID NO: 1937 - DNA, 22 bp, Homo sapiens
accggaagcaaggaaggtgctg

SEQ ID NO: 1938 - DNA, 19 bp, Homo sapiens
accggaagtagagtcacgg

SEQ ID NO: 1939 - DNA, 21 bp, Homo sapiens
accggaagtgccgaatgggga

SEQ ID NO: 1940 - DNA, 19 bp, Homo sapiens
accggaagtgcgggcgagc

SEQ ID NO: 1941 - DNA, 18 bp, Homo sapiens
accggaagtgcggtccgc

SEQ ID NO: 1942 - DNA, 17 bp, Homo sapiens
accggacagagacgagg

SEQ ID NO: 1943 - DNA, 19 bp, Homo sapiens
accggacagagacgaggag

SEQ ID NO: 1944 - DNA, 19 bp, Homo sapiens
accggacccgcaaccacca

SEQ ID NO: 1945 - DNA, 18 bp, Homo sapiens
accggacgccgagagcgg

SEQ ID NO: 1946 - DNA, 19 bp, Homo sapiens
accggacgccgagagcggt

SEQ ID NO: 1947 - DNA, 19 bp, Homo sapiens
accggacgcgcgcggcctc

SEQ ID NO: 1948 - DNA, 18 bp, Homo sapiens
accggacggagcgggcgg

SEQ ID NO: 1949 - DNA, 19 bp, Homo sapiens
accggacggagcgggcggc

SEQ ID NO: 1950 - DNA, 21 bp, Homo sapiens
accggactggctgaggggcaa

SEQ ID NO: 1951 - DNA, 18 bp, Homo sapiens
accggagaagctgtgagg

SEQ ID NO: 1952 - DNA, 19 bp, Homo sapiens
accggagagaagcaggaag

SEQ ID NO: 1953 - DNA, 18 bp, Homo sapiens
accggagagggcgcactg

SEQ ID NO: 1954 - DNA, 19 bp, Homo sapiens
accggagagggcgcactgc

SEQ ID NO: 1955 - DNA, 18 bp, Homo sapiens
accggagcgcggagacct

SEQ ID NO: 1956 - DNA, 22 bp, Homo sapiens
accggagcggcccggcgacgcg

SEQ ID NO: 1957 - DNA, 19 bp, Homo sapiens
accggagctgaggcaggaa

SEQ ID NO: 1958 - DNA, 22 bp, Homo sapiens
accggagctgaggcaggaagag

SEQ ID NO: 1959 - DNA, 18 bp, Homo sapiens
accggagctggagtcgga

SEQ ID NO: 1960 - DNA, 22 bp, Homo sapiens
accggaggagaaagatggcggc

SEQ ID NO: 1961 - DNA, 16 bp, Homo sapiens
accggatcggtcggaa

SEQ ID NO: 1962 - DNA, 17 bp, Homo sapiens
accggatcggtcggaaa

SEQ ID NO: 1963 - DNA, 18 bp, Homo sapiens
accggcaaggggtgcgcg

SEQ ID NO: 1964 - DNA, 18 bp, Homo sapiens
accggcagaacacagcag

SEQ ID NO: 1965 - DNA, 18 bp, Homo sapiens
accggcccgatgagctgc

SEQ ID NO: 1966 - DNA, 19 bp, Homo sapiens
accggccgaaccttgggtg

SEQ ID NO: 1967 - DNA, 19 bp, Homo sapiens
accggccgccggcaccgac

SEQ ID NO: 1968 - DNA, 20 bp, Homo sapiens
accggccgccgggcctctgg

SEQ ID NO: 1969 - DNA, 17 bp, Homo sapiens
accggcctgagcggagg

SEQ ID NO: 1970 - DNA, 17 bp, Homo sapiens
accggcctggagatgga

SEQ ID NO: 1971 - DNA, 18 bp, Homo sapiens
accggcgaggaataggaa

SEQ ID NO: 1972 - DNA, 21 bp, Homo sapiens
accggcgaggaataggaatca

SEQ ID NO: 1973 - DNA, 19 bp, Homo sapiens
accggcgcggcgtagtgga

SEQ ID NO: 1974 - DNA, 19 bp, Homo sapiens
accggcgcggtctatggct

SEQ ID NO: 1975 - DNA, 18 bp, Homo sapiens
accggcgggatttgatgg

SEQ ID NO: 1976 - DNA, 20 bp, Homo sapiens
accggctgcgcccttcagta

SEQ ID NO: 1977 - DNA, 18 bp, Homo sapiens
accggctgcggagcggcg

SEQ ID NO: 1978 - DNA, 19 bp, Homo sapiens
accggctgctgagacgaac

SEQ ID NO: 1979 - DNA, 19 bp, Homo sapiens
accggctggcgggcggggg

SEQ ID NO: 1980 - DNA, 18 bp, Homo sapiens
accgggaaggggagcgtg

SEQ ID NO: 1981 - DNA, 16 bp, Homo sapiens
accgggacaagaccag

SEQ ID NO: 1982 - DNA, 18 bp, Homo sapiens
accgggacggagagcgcc

SEQ ID NO: 1983 - DNA, 23 bp, Homo sapiens
accgggacggagagcgcccgccg

SEQ ID NO: 1984 - DNA, 19 bp, Homo sapiens
accgggagagcagtggggg

SEQ ID NO: 1985 - DNA, 19 bp, Homo sapiens
accgggaggctgaggtcgg

SEQ ID NO: 1986 - DNA, 17 bp, Homo sapiens
accgggatggcgacgtc

SEQ ID NO: 1987 - DNA, 21 bp, Homo sapiens
accgggcggcacgcacgcggt

SEQ ID NO: 1988 - DNA, 17 bp, Homo sapiens
accgggcggctgaccga

SEQ ID NO: 1989 - DNA, 19 bp, Homo sapiens
accggggcagtggctgctg

SEQ ID NO: 1990 - DNA, 20 bp, Homo sapiens
gaggactggcgctgaggagg

SEQ ID NO: 1991 - DNA, 19 bp, Homo sapiens
gaggagaagagcaaacagg

SEQ ID NO: 1992 - DNA, 18 bp, Homo sapiens
gaggagaagctgccgccc

SEQ ID NO: 1993 - DNA, 18 bp, Homo sapiens
gaggagaaggggaccgag

SEQ ID NO: 1994 - DNA, 18 bp, Homo sapiens
gaggagacagggctactg

SEQ ID NO: 1995 - DNA, 18 bp, Homo sapiens
gaggagaccaacggaccg

SEQ ID NO: 1996 - DNA, 19 bp, Homo sapiens
gaggagaccaacggaccgg

SEQ ID NO: 1997 - DNA, 20 bp, Homo sapiens
gaggagaccaacggaccgga

SEQ ID NO: 1998 - DNA, 21 bp, Homo sapiens
gaggagagaagaggaggtgga

SEQ ID NO: 1999 - DNA, 21 bp, Homo sapiens
gaggagagaagatggcggaag

SEQ ID NO: 2000 - DNA, 19 bp, Homo sapiens
gaggagagagaaacgcagg

SEQ ID NO: 2001 - DNA, 18 bp, Homo sapiens
gaggagaggacagctggt

SEQ ID NO: 2002 - DNA, 19 bp, Homo sapiens
gaggagaggacagctggtt

SEQ ID NO: 2003 - DNA, 20 bp, Homo sapiens
gaggagaggacagctggttg

SEQ ID NO: 2004 - DNA, 19 bp, Homo sapiens
gaggagataggcatcttgg

SEQ ID NO: 2005 - DNA, 19 bp, Homo sapiens
gaggagcagccgctgccgc

SEQ ID NO: 2006 - DNA, 18 bp, Homo sapiens
gaggagcctgaagattct

SEQ ID NO: 2007 - DNA, 19 bp, Homo sapiens
gaggagcggccggaagtag

SEQ ID NO: 2008 - DNA, 21 bp, Homo sapiens
gaggagcgggccgtggaggct

SEQ ID NO: 2009 - DNA, 18 bp, Homo sapiens
gaggagcgggtggccccg

SEQ ID NO: 2010 - DNA, 19 bp, Homo sapiens
gaggagctgcctcgcgcag

SEQ ID NO: 2011 - DNA, 20 bp, Homo sapiens
gaggaggaagtgtcatggcg

SEQ ID NO: 2012 - DNA, 19 bp, Homo sapiens
gaggaggaattgaattcgc

SEQ ID NO: 2013 - DNA, 18 bp, Homo sapiens
gaggaggagccggagacg

SEQ ID NO: 2014 - DNA, 21 bp, Homo sapiens
gaggaggaggcactgtaaggg

SEQ ID NO: 2015 - DNA, 18 bp, Homo sapiens
gaggaggcgaattagtcc

SEQ ID NO: 2016 - DNA, 18 bp, Homo sapiens
gaggaggcggccgaaccg

SEQ ID NO: 2017 - DNA, 18 bp, Homo sapiens
gaggaggcgttggacggg

SEQ ID NO: 2018 - DNA, 15 bp, Homo sapiens
gaggagggagaggct

SEQ ID NO: 2019 - DNA, 19 bp, Homo sapiens
gaggagggcgctccaggcg

SEQ ID NO: 2020 - DNA, 18 bp, Homo sapiens
gaggaggggacccgggcg

SEQ ID NO: 2021 - DNA, 19 bp, Homo sapiens
gaggaggggagcgggaagc

SEQ ID NO: 2022 - DNA, 23 bp, Homo sapiens
gaggagggtggcggagatggaga

SEQ ID NO: 2023 - DNA, 21 bp, Homo sapiens
gaggaggtcgcggggcgagaa

SEQ ID NO: 2024 - DNA, 18 bp, Homo sapiens
gaggagtacggattaagt

SEQ ID NO: 2025 - DNA, 18 bp, Homo sapiens
gaggagtcggaacccgaa

SEQ ID NO: 2026 - DNA, 19 bp, Homo sapiens
gaggagtcggaacccgaac

SEQ ID NO: 2027 - DNA, 16 bp, Homo sapiens
gaggagtgcggaaccc

SEQ ID NO: 2028 - DNA, 18 bp, Homo sapiens
gaggagttggtcgcacaa

SEQ ID NO: 2029 - DNA, 18 bp, Homo sapiens
gaggataaggcgctgtca

SEQ ID NO: 2030 - DNA, 19 bp, Homo sapiens
gaggatccggagcagctgc

SEQ ID NO: 2031 - DNA, 17 bp, Homo sapiens
gaggatcgacatggacg

SEQ ID NO: 2032 - DNA, 19 bp, Homo sapiens
gaggatcgtggtactgcta

SEQ ID NO: 2033 - DNA, 16 bp, Homo sapiens
gaggatctgaagccgg

SEQ ID NO: 2034 - DNA, 20 bp, Homo sapiens
gaggatctggaggacggaga

SEQ ID NO: 2035 - DNA, 19 bp, Homo sapiens
gaggatgaggaagcgcggg

SEQ ID NO: 2036 - DNA, 18 bp, Homo sapiens
gaggatgatttcatgtgc

SEQ ID NO: 2037 - DNA, 18 bp, Homo sapiens
gaggatgcagacactggc

SEQ ID NO: 2038 - DNA, 19 bp, Homo sapiens
gaggatgctgggaaggagg

SEQ ID NO: 2039 - DNA, 17 bp, Homo sapiens
gaggatggaagcgctgg

SEQ ID NO: 2040 - DNA, 18 bp, Homo sapiens
gaggatggcggacgccgg

SEQ ID NO: 2041 - DNA, 17 bp, Homo sapiens
gaggatgtggtggcgac

SEQ ID NO: 2042 - DNA, 20 bp, Homo sapiens
gaggattaaagatggccacc

SEQ ID NO: 2043 - DNA, 17 bp, Homo sapiens
gaggcaagaggtagcaa

SEQ ID NO: 2044 - DNA, 19 bp, Homo sapiens
gaggcagcagcggacgtga

SEQ ID NO: 2045 - DNA, 20 bp, Homo sapiens
gaggcagcagcggtagaggc

SEQ ID NO: 2046 - DNA, 19 bp, Homo sapiens
gaggcagcgcggttcctct

SEQ ID NO: 2047 - DNA, 21 bp, Homo sapiens
accggggcgagcagagagctg

SEQ ID NO: 2048 - DNA, 18 bp, Homo sapiens
accggggctggcggagcg

SEQ ID NO: 2049 - DNA, 17 bp, Homo sapiens
accggggtgttgggtgc

SEQ ID NO: 2050 - DNA, 18 bp, Homo sapiens
accgggtagagagcgggg

SEQ ID NO: 2051 - DNA, 19 bp, Homo sapiens
accgggtccagacccacgc

SEQ ID NO: 2052 - DNA, 19 bp, Homo sapiens
accgggtggtttgcttagg

SEQ ID NO: 2053 - DNA, 19 bp, Homo sapiens
accggtacttaagcgcgga

SEQ ID NO: 2054 - DNA, 16 bp, Homo sapiens
accggtcgcggcaatc

SEQ ID NO: 2055 - DNA, 18 bp, Homo sapiens
accggtcgcggcaatcct

SEQ ID NO: 2056 - DNA, 20 bp, Homo sapiens
accggtcgcggcaatcctag

SEQ ID NO: 2057 - DNA, 19 bp, Homo sapiens
accggtcggcctgggcaac

SEQ ID NO: 2058 - DNA, 18 bp, Homo sapiens
accggtctctagtagtgc

SEQ ID NO: 2059 - DNA, 20 bp, Homo sapiens
accggtctctagtagtgcag

SEQ ID NO: 2060 - DNA, 22 bp, Homo sapiens
accggtgacccggctagccggc

SEQ ID NO: 2061 - DNA, 18 bp, Homo sapiens
accggtgagtgtcgcttc

SEQ ID NO: 2062 - DNA, 17 bp, Homo sapiens
accggtgagtttgagcc

SEQ ID NO: 2063 - DNA, 19 bp, Homo sapiens
accggtgcgggcgcggggt

SEQ ID NO: 2064 - DNA, 16 bp, Homo sapiens
accggtggggccgacg

SEQ ID NO: 2065 - DNA, 18 bp, Homo sapiens
accggtggtctgggctgg

SEQ ID NO: 2066 - DNA, 19 bp, Homo sapiens
accgtacgtccgtttgtcc

SEQ ID NO: 2067 - DNA, 16 bp, Homo sapiens
accgtactaggtagat

SEQ ID NO: 2068 - DNA, 18 bp, Homo sapiens
accgtactaggtagatgg

SEQ ID NO: 2069 - DNA, 19 bp, Homo sapiens
accgtactaggtagatggt

SEQ ID NO: 2070 - DNA, 18 bp, Homo sapiens
accgtactcgtctccccc

SEQ ID NO: 2071 - DNA, 16 bp, Homo sapiens
accgtcacggccggcg

SEQ ID NO: 2072 - DNA, 16 bp, Homo sapiens
accgtgactaagatgg

SEQ ID NO: 2073 - DNA, 19 bp, Homo sapiens
accgtgactaagatggaag

SEQ ID NO: 2074 - DNA, 21 bp, Homo sapiens
accgtgactaagatggaagcg

SEQ ID NO: 2075 - DNA, 22 bp, Homo sapiens
accgtgaggactgcggggacgg

SEQ ID NO: 2076 - DNA, 22 bp, Homo sapiens
accgtggagtcggttggacgcg

SEQ ID NO: 2077 - DNA, 16 bp, Homo sapiens
accgtgtgagaatccc

SEQ ID NO: 2078 - DNA, 17 bp, Homo sapiens
accgtgtgggagcggga

SEQ ID NO: 2079 - DNA, 17 bp, Homo sapiens
accgtgtgtagttggca

SEQ ID NO: 2080 - DNA, 18 bp, Homo sapiens
accgtgtgtagttggcat

SEQ ID NO: 2081 - DNA, 20 bp, Homo sapiens
accgtgtgtagttggcatct

SEQ ID NO: 2082 - DNA, 23 bp, Homo sapiens
accgtgtgtagttggcatctccg

SEQ ID NO: 2083 - DNA, 24 bp, Homo sapiens
accgttgggcggttccgcggggcg

SEQ ID NO: 2084 - DNA, 20 bp, Homo sapiens
accgttttttgtggtgtact

SEQ ID NO: 2085 - DNA, 21 bp, Homo sapiens
acctaaacaaccgagcaagac

SEQ ID NO: 2086 - DNA, 24 bp, Homo sapiens
acctacagtggactacccgatttt

SEQ ID NO: 2087 - DNA, 19 bp, Homo sapiens
acctacgacgatcgggcct

SEQ ID NO: 2088 - DNA, 24 bp, Homo sapiens
acctagaggaggggagcagagcgt

SEQ ID NO: 2089 - DNA, 17 bp, Homo sapiens
acctaggccgcgggacc

SEQ ID NO: 2090 - DNA, 16 bp, Homo sapiens
acctaggtcgcggcga

SEQ ID NO: 2091 - DNA, 19 bp, Homo sapiens
acctcaccctcgccgagcc

SEQ ID NO: 2092 - DNA, 18 bp, Homo sapiens
acctcattcatttctacc

SEQ ID NO: 2093 - DNA, 19 bp, Homo sapiens
acctccaaccccagatatg

SEQ ID NO: 2094 - DNA, 18 bp, Homo sapiens
acctcccccaggagaccg

SEQ ID NO: 2095 - DNA, 22 bp, Homo sapiens
acctcccgggccagtcgcgcgg

SEQ ID NO: 2096 - DNA, 23 bp, Homo sapiens
acctccggaagtgacagtaacag

SEQ ID NO: 2097 - DNA, 20 bp, Homo sapiens
acctcctcccacagggggaa

SEQ ID NO: 2098 - DNA, 20 bp, Homo sapiens
acctcgaggatcgacatgga

SEQ ID NO: 2099 - DNA, 18 bp, Homo sapiens
acctcgcagtcggccctc

SEQ ID NO: 2100 - DNA, 22 bp, Homo sapiens
acctcgcgccccagcaggtgag

SEQ ID NO: 2101 - DNA, 16 bp, Homo sapiens
acctcgcgcggacgga

SEQ ID NO: 2102 - DNA, 19 bp, Homo sapiens
acctcgcggccgtaggcta

SEQ ID NO: 2103 - DNA, 18 bp, Homo sapiens
acctcggccagtgtgagc

SEQ ID NO: 2104 - DNA, 19 bp, Homo sapiens
gaggcagcggttggaggcg

SEQ ID NO: 2105 - DNA, 17 bp, Homo sapiens
gaggcagcgtgagagca

SEQ ID NO: 2106 - DNA, 18 bp, Homo sapiens
gaggcaggaagctgtgag

SEQ ID NO: 2107 - DNA, 18 bp, Homo sapiens
gaggcaggcgagccggac

SEQ ID NO: 2108 - DNA, 16 bp, Homo sapiens
gaggcagggcccgggg

SEQ ID NO: 2109 - DNA, 19 bp, Homo sapiens
gaggcagggcccggggaga

SEQ ID NO: 2110 - DNA, 18 bp, Homo sapiens
gaggcagtgtctcccggt

SEQ ID NO: 2111 - DNA, 18 bp, Homo sapiens
gaggcagttggaagatgg

SEQ ID NO: 2112 - DNA, 16 bp, Homo sapiens
gaggccacgccccaga

SEQ ID NO: 2113 - DNA, 16 bp, Homo sapiens
gaggccagagccggag

SEQ ID NO: 2114 - DNA, 18 bp, Homo sapiens
gaggcccagcgggagtcg

SEQ ID NO: 2115 - DNA, 23 bp, Homo sapiens
gaggccccgactgagcagctgga

SEQ ID NO: 2116 - DNA, 16 bp, Homo sapiens
gaggcccgggcgcgac

SEQ ID NO: 2117 - DNA, 18 bp, Homo sapiens
gaggcccttagttgactg

SEQ ID NO: 2118 - DNA, 19 bp, Homo sapiens
gaggccgcgggagcctgca

SEQ ID NO: 2119 - DNA, 18 bp, Homo sapiens
gaggccgcgggccgggaa

SEQ ID NO: 2120 - DNA, 20 bp, Homo sapiens
gaggccggactcaacgggtc

SEQ ID NO: 2121 - DNA, 18 bp, Homo sapiens
gaggccggagcggagccg

SEQ ID NO: 2122 - DNA, 14 bp, Homo sapiens
gaggccggcccgac

SEQ ID NO: 2123 - DNA, 17 bp, Homo sapiens
gaggccggcccgacgag

SEQ ID NO: 2124 - DNA, 23 bp, Homo sapiens
gaggccgggccggggagagggcg

SEQ ID NO: 2125 - DNA, 18 bp, Homo sapiens
gaggccgggctgagacgt

SEQ ID NO: 2126 - DNA, 18 bp, Homo sapiens
gaggccggggactgaagg

SEQ ID NO: 2127 - DNA, 21 bp, Homo sapiens
gaggccggtgaggcgccggcg

SEQ ID NO: 2128 - DNA, 18 bp, Homo sapiens
gaggccttgagaagaaga

SEQ ID NO: 2129 - DNA, 22 bp, Homo sapiens
gaggcgacgcggagagggcggc

SEQ ID NO: 2130 - DNA, 16 bp, Homo sapiens
gaggcgagcgtgagcc

SEQ ID NO: 2131 - DNA, 22 bp, Homo sapiens
gaggcgagctccggcccgggtg

SEQ ID NO: 2132 - DNA, 16 bp, Homo sapiens
gaggcgagtgggaagg

SEQ ID NO: 2133 - DNA, 19 bp, Homo sapiens
gaggcgagtgggaagggac

SEQ ID NO: 2134 - DNA, 19 bp, Homo sapiens
gaggcgatatttctagggg

SEQ ID NO: 2135 - DNA, 21 bp, Homo sapiens
gaggcgcgccgggtgctggtg

SEQ ID NO: 2136 - DNA, 18 bp, Homo sapiens
gaggcgcgtggagagcca

SEQ ID NO: 2137 - DNA, 18 bp, Homo sapiens
gaggcggagaagaagagg

SEQ ID NO: 2138 - DNA, 18 bp, Homo sapiens
gaggcggagcagagtcga

SEQ ID NO: 2139 - DNA, 18 bp, Homo sapiens
gaggcggaggaaccggtg

SEQ ID NO: 2140 - DNA, 18 bp, Homo sapiens
gaggcggaggtcgataag

SEQ ID NO: 2141 - DNA, 17 bp, Homo sapiens
gaggcggagtgactcgg

SEQ ID NO: 2142 - DNA, 18 bp, Homo sapiens
gaggcggcaccgctcacc

SEQ ID NO: 2143 - DNA, 20 bp, Homo sapiens
gaggcggcagccaggctgtg

SEQ ID NO: 2144 - DNA, 16 bp, Homo sapiens
gaggcggcctcgaggg

SEQ ID NO: 2145 - DNA, 18 bp, Homo sapiens
gaggcggcgccagttggc

SEQ ID NO: 2146 - DNA, 16 bp, Homo sapiens
gaggcggcggcaaaat

SEQ ID NO: 2147 - DNA, 18 bp, Homo sapiens
gaggcggcgggcgaagcg

SEQ ID NO: 2148 - DNA, 20 bp, Homo sapiens
gaggcgggaccgacggtgtg

SEQ ID NO: 2149 - DNA, 20 bp, Homo sapiens
gaggcgggcagcaccccagt

SEQ ID NO: 2150 - DNA, 16 bp, Homo sapiens
gaggcgggcgccaact

SEQ ID NO: 2151 - DNA, 18 bp, Homo sapiens
gaggcgggcgtggacgag

SEQ ID NO: 2152 - DNA, 19 bp, Homo sapiens
gaggcgggctgaggcggcc

SEQ ID NO: 2153 - DNA, 16 bp, Homo sapiens
gaggcggggtcgggcc

SEQ ID NO: 2154 - DNA, 21 bp, Homo sapiens
gaggcgttggcgggcggcgag

SEQ ID NO: 2155 - DNA, 17 bp, Homo sapiens
gaggctacgtgaagaga

SEQ ID NO: 2156 - DNA, 16 bp, Homo sapiens
gaggctccggcggacc

SEQ ID NO: 2157 - DNA, 18 bp, Homo sapiens
gaggctccgggctagcta

SEQ ID NO: 2158 - DNA, 19 bp, Homo sapiens
gaggctcgggtcgttgtgg

SEQ ID NO: 2159 - DNA, 20 bp, Homo sapiens
gaggctctagatggcggctg

SEQ ID NO: 2160 - DNA, 18 bp, Homo sapiens
gaggctgaagattgggtt

SEQ ID NO: 2161 - DNA, 18 bp, Homo sapiens
acctcggggtcgttaggc

SEQ ID NO: 2162 - DNA, 19 bp, Homo sapiens
acctcgtcattgtcaggca

SEQ ID NO: 2163 - DNA, 22 bp, Homo sapiens
acctcgttggcagagcagttgt

SEQ ID NO: 2164 - DNA, 17 bp, Homo sapiens
acctctatgggccgggt

SEQ ID NO: 2165 - DNA, 20 bp, Homo sapiens
acctgactgaaggaggccac

SEQ ID NO: 2166 - DNA, 19 bp, Homo sapiens
acctgagctacgagccgcg

SEQ ID NO: 2167 - DNA, 18 bp, Homo sapiens
acctgcatcccggacctg

SEQ ID NO: 2168 - DNA, 19 bp, Homo sapiens
acctgcatcccggacctgc

SEQ ID NO: 2169 - DNA, 17 bp, Homo sapiens
acctgcgagcctggagg

SEQ ID NO: 2170 - DNA, 18 bp, Homo sapiens
acctgcgctcgggaggtt

SEQ ID NO: 2171 - DNA, 18 bp, Homo sapiens
acctggacagggctgcgg

SEQ ID NO: 2172 - DNA, 20 bp, Homo sapiens
acctggagaagttcgtggag

SEQ ID NO: 2173 - DNA, 16 bp, Homo sapiens
acctggagcaggaatg

SEQ ID NO: 2174 - DNA, 18 bp, Homo sapiens
acctggatctggagccgg

SEQ ID NO: 2175 - DNA, 17 bp, Homo sapiens
acctggcgtactggctg

SEQ ID NO: 2176 - DNA, 18 bp, Homo sapiens
acctggctttactatggc

SEQ ID NO: 2177 - DNA, 18 bp, Homo sapiens
acctgggacgggtctggg

SEQ ID NO: 2178 - DNA, 19 bp, Homo sapiens
acctgggctgttgttgcgg

SEQ ID NO: 2179 - DNA, 18 bp, Homo sapiens
acctgtgactctcggccg

SEQ ID NO: 2180 - DNA, 22 bp, Homo sapiens
accttctgcgtgctgacataga

SEQ ID NO: 2181 - DNA, 18 bp, Homo sapiens
accttgcagcctggacac

SEQ ID NO: 2182 - DNA, 18 bp, Homo sapiens
accttggatgtgggagga

SEQ ID NO: 2183 - DNA, 19 bp, Homo sapiens
accttggatgtgggaggat

SEQ ID NO: 2184 - DNA, 18 bp, Homo sapiens
accttgggctacggctga

SEQ ID NO: 2185 - DNA, 18 bp, Homo sapiens
accttgtcgaaggaccaa

SEQ ID NO: 2186 - DNA, 18 bp, Homo sapiens
acctttctctgcgcagta

SEQ ID NO: 2187 - DNA, 17 bp, Homo sapiens
acctttgcacgcgcaca

SEQ ID NO: 2188 - DNA, 19 bp, Homo sapiens
acgaacaggcgctggcgtc

SEQ ID NO: 2189 - DNA, 19 bp, Homo sapiens
acgaagaaggcgtcccggc

SEQ ID NO: 2190 - DNA, 18 bp, Homo sapiens
acgaagacggaaccggag

SEQ ID NO: 2191 - DNA, 22 bp, Homo sapiens
acgaagacggaaccggagccgg

SEQ ID NO: 2192 - DNA, 18 bp, Homo sapiens
acgaaggaggcgggacgg

SEQ ID NO: 2193 - DNA, 17 bp, Homo sapiens
acgaaggcggcggcgat

SEQ ID NO: 2194 - DNA, 18 bp, Homo sapiens
acgacatatcaacatccg

SEQ ID NO: 2195 - DNA, 18 bp, Homo sapiens
acgacccgcgcctccagc

SEQ ID NO: 2196 - DNA, 18 bp, Homo sapiens
acgaccgagattagggtg

SEQ ID NO: 2197 - DNA, 18 bp, Homo sapiens
acgacctcgggtcccacg

SEQ ID NO: 2198 - DNA, 19 bp, Homo sapiens
acgacgatcgggcctacag

SEQ ID NO: 2199 - DNA, 20 bp, Homo sapiens
acgacgcggatgagggtagg

SEQ ID NO: 2200 - DNA, 16 bp, Homo sapiens
acgacgggaactagct

SEQ ID NO: 2201 - DNA, 21 bp, Homo sapiens
acgacgtagaccaggtaagtg

SEQ ID NO: 2202 - DNA, 18 bp, Homo sapiens
acgactctgcagaaggaa

SEQ ID NO: 2203 - DNA, 19 bp, Homo sapiens
acgagaatcgcggagcctg

SEQ ID NO: 2204 - DNA, 18 bp, Homo sapiens
acgagactgcacggtgag

SEQ ID NO: 2205 - DNA, 17 bp, Homo sapiens
acgagagctgctggtgg

SEQ ID NO: 2206 - DNA, 18 bp, Homo sapiens
acgagagggcctgacgta

SEQ ID NO: 2207 - DNA, 16 bp, Homo sapiens
acgagattggcttgga

SEQ ID NO: 2208 - DNA, 20 bp, Homo sapiens
acgagcggcagctgcgggcg

SEQ ID NO: 2209 - DNA, 18 bp, Homo sapiens
acgagctgtgaggggatt

SEQ ID NO: 2210 - DNA, 20 bp, Homo sapiens
acgaggactgcgaggacggc

SEQ ID NO: 2211 - DNA, 17 bp, Homo sapiens
acgaggcgccgcccgcc

SEQ ID NO: 2212 - DNA, 19 bp, Homo sapiens
acgaggcgcgcagaaggaa

SEQ ID NO: 2213 - DNA, 16 bp, Homo sapiens
acgagggaggaacgcg

SEQ ID NO: 2214 - DNA, 20 bp, Homo sapiens
acgagggcctggggagcggc

SEQ ID NO: 2215 - DNA, 19 bp, Homo sapiens
acgagtgcggtaacaccgt

SEQ ID NO: 2216 - DNA, 17 bp, Homo sapiens
acgatcgggcctacagc

SEQ ID NO: 2217 - DNA, 24 bp, Homo sapiens
acgcaacccagcgaaactccgcgg

SEQ ID NO: 2218 - DNA, 19 bp, Homo sapiens
gaggctgaggctggggcca

SEQ ID NO: 2219 - DNA, 20 bp, Homo sapiens
gaggctggcatctgggtaag

SEQ ID NO: 2220 - DNA, 18 bp, Homo sapiens
gaggctggcgcggctgct

SEQ ID NO: 2221 - DNA, 18 bp, Homo sapiens
gaggctggtcgtggactg

SEQ ID NO: 2222 - DNA, 18 bp, Homo sapiens
gaggcttagggcgtccga

SEQ ID NO: 2223 - DNA, 16 bp, Homo sapiens
gagggaaacaaacgcc

SEQ ID NO: 2224 - DNA, 20 bp, Homo sapiens
gagggaaggagatgaacgag

SEQ ID NO: 2225 - DNA, 17 bp, Homo sapiens
gagggaagtcgtggtgg

SEQ ID NO: 2226 - DNA, 20 bp, Homo sapiens
gagggacggccggtcccgtc

SEQ ID NO: 2227 - DNA, 20 bp, Homo sapiens
gagggactaaggggctgggg

SEQ ID NO: 2228 - DNA, 23 bp, Homo sapiens
gagggagagagagagcaagaggg

SEQ ID NO: 2229 - DNA, 17 bp, Homo sapiens
gagggagccggcgaaga

SEQ ID NO: 2230 - DNA, 20 bp, Homo sapiens
gagggagcgagcgagccggc

SEQ ID NO: 2231 - DNA, 18 bp, Homo sapiens
gagggagcgcaggcccct

SEQ ID NO: 2232 - DNA, 19 bp, Homo sapiens
gagggaggaagtagcgtgg

SEQ ID NO: 2233 - DNA, 19 bp, Homo sapiens
gagggaggacagcggggcc

SEQ ID NO: 2234 - DNA, 16 bp, Homo sapiens
gagggaggccagccgc

SEQ ID NO: 2235 - DNA, 20 bp, Homo sapiens
gagggaggcgcgagggaggc

SEQ ID NO: 2236 - DNA, 24 bp, Homo sapiens
gagggagtcggtgtggacgcgagg

SEQ ID NO: 2237 - DNA, 18 bp, Homo sapiens
gagggatagggccagcaa

SEQ ID NO: 2238 - DNA, 18 bp, Homo sapiens
gagggatagtcggagcga

SEQ ID NO: 2239 - DNA, 20 bp, Homo sapiens
gagggatagtcggagcgagg

SEQ ID NO: 2240 - DNA, 18 bp, Homo sapiens
gagggcacggggaaaagg

SEQ ID NO: 2241 - DNA, 19 bp, Homo sapiens
gagggcacggggaaaaggt

SEQ ID NO: 2242 - DNA, 18 bp, Homo sapiens
gagggcagactgatccga

SEQ ID NO: 2243 - DNA, 21 bp, Homo sapiens
gagggcaggagctggggccac

SEQ ID NO: 2244 - DNA, 19 bp, Homo sapiens
gagggcagggggcaaccgg

SEQ ID NO: 2245 - DNA, 16 bp, Homo sapiens
gagggcagtaagatat

SEQ ID NO: 2246 - DNA, 20 bp, Homo sapiens
gagggcagtcatgaggtcag

SEQ ID NO: 2247 - DNA, 19 bp, Homo sapiens
gagggcccgtcggacagcc

SEQ ID NO: 2248 - DNA, 18 bp, Homo sapiens
gagggccgcgcagtcgga

SEQ ID NO: 2249 - DNA, 16 bp, Homo sapiens
gagggcgagaacggag

SEQ ID NO: 2250 - DNA, 20 bp, Homo sapiens
gagggcgagaggactgagtg

SEQ ID NO: 2251 - DNA, 18 bp, Homo sapiens
gagggcggacggaccgac

SEQ ID NO: 2252 - DNA, 17 bp, Homo sapiens
gagggcggagtagacgg

SEQ ID NO: 2253 - DNA, 22 bp, Homo sapiens
gagggcggggacaactgggtct

SEQ ID NO: 2254 - DNA, 16 bp, Homo sapiens
gagggcgggtaggcgg

SEQ ID NO: 2255 - DNA, 20 bp, Homo sapiens
gagggcgggtggaggaggaa

SEQ ID NO: 2256 - DNA, 21 bp, Homo sapiens
gagggctagcgagcgcagcgg

SEQ ID NO: 2257 - DNA, 17 bp, Homo sapiens
gagggctgtgccggttg

SEQ ID NO: 2258 - DNA, 16 bp, Homo sapiens
gaggggccctgatttc

SEQ ID NO: 2259 - DNA, 17 bp, Homo sapiens
gaggggcgaagggccgg

SEQ ID NO: 2260 - DNA, 19 bp, Homo sapiens
gaggggcggtctgcgggga

SEQ ID NO: 2261 - DNA, 18 bp, Homo sapiens
gaggggctgtattgaagt

SEQ ID NO: 2262 - DNA, 21 bp, Homo sapiens
gagggggtggtttcaggagtt

SEQ ID NO: 2263 - DNA, 18 bp, Homo sapiens
gaggggtgcgcagcattc

SEQ ID NO: 2264 - DNA, 23 bp, Homo sapiens
gaggggtgcgcagcattcggcag

SEQ ID NO: 2265 - DNA, 19 bp, Homo sapiens
gaggggtgtggacggtttg

SEQ ID NO: 2266 - DNA, 17 bp, Homo sapiens
gagggtactggggcgtg

SEQ ID NO: 2267 - DNA, 19 bp, Homo sapiens
gagggtagccgagcggggc

SEQ ID NO: 2268 - DNA, 16 bp, Homo sapiens
gagggtaggatggcgt

SEQ ID NO: 2269 - DNA, 20 bp, Homo sapiens
gagggtaggatggcgtctgg

SEQ ID NO: 2270 - DNA, 19 bp, Homo sapiens
gagggtatactggaaaacg

SEQ ID NO: 2271 - DNA, 19 bp, Homo sapiens
gagggtatgggggcctggc

SEQ ID NO: 2272 - DNA, 19 bp, Homo sapiens
gagggtcgttttaaagggc

SEQ ID NO: 2273 - DNA, 19 bp, Homo sapiens
gaggtaaagaagtcatggc

SEQ ID NO: 2274 - DNA, 16 bp, Homo sapiens
gaggtaaaggccgcgc

SEQ ID NO: 2275 - DNA, 18 bp, Homo sapiens
acgcaagatggcggcgcc

SEQ ID NO: 2276 - DNA, 18 bp, Homo sapiens
acgcaagcatggtaggac

SEQ ID NO: 2277 - DNA, 19 bp, Homo sapiens
acgcaagcatggtaggact

SEQ ID NO: 2278 - DNA, 18 bp, Homo sapiens
acgcaagggctcgagacg

SEQ ID NO: 2279 - DNA, 19 bp, Homo sapiens
acgcaagggctcgagacgc

SEQ ID NO: 2280 - DNA, 18 bp, Homo sapiens
acgcacaggagcctgcac

SEQ ID NO: 2281 - DNA, 18 bp, Homo sapiens
acgcacctcgccaggaaa

SEQ ID NO: 2282 - DNA, 16 bp, Homo sapiens
acgcacttgcggcccg

SEQ ID NO: 2283 - DNA, 18 bp, Homo sapiens
acgcagagcccggcccga

SEQ ID NO: 2284 - DNA, 19 bp, Homo sapiens
acgcagagcccggcccgac

SEQ ID NO: 2285 - DNA, 18 bp, Homo sapiens
acgcagcagccaccgccg

SEQ ID NO: 2286 - DNA, 22 bp, Homo sapiens
acgcagcggtgaggaccgcggc

SEQ ID NO: 2287 - DNA, 19 bp, Homo sapiens
acgcagcggttgggaacac

SEQ ID NO: 2288 - DNA, 14 bp, Homo sapiens
acgcaggagaccgg

SEQ ID NO: 2289 - DNA, 17 bp, Homo sapiens
acgcagggagggcccag

SEQ ID NO: 2290 - DNA, 18 bp, Homo sapiens
acgcagtgaccgaaggct

SEQ ID NO: 2291 - DNA, 18 bp, Homo sapiens
acgcatgcgtgctgtggt

SEQ ID NO: 2292 - DNA, 21 bp, Homo sapiens
acgccaggaaggaaggacgcg

SEQ ID NO: 2293 - DNA, 21 bp, Homo sapiens
acgcccccgccgacaggagaa

SEQ ID NO: 2294 - DNA, 17 bp, Homo sapiens
acgccccgcgctgctgg

SEQ ID NO: 2295 - DNA, 20 bp, Homo sapiens
acgccccggggccacttcca

SEQ ID NO: 2296 - DNA, 18 bp, Homo sapiens
acgccgaccggcgcggcg

SEQ ID NO: 2297 - DNA, 19 bp, Homo sapiens
acgccgccaacatggtgag

SEQ ID NO: 2298 - DNA, 17 bp, Homo sapiens
acgccgcggaggagacc

SEQ ID NO: 2299 - DNA, 18 bp, Homo sapiens
acgccgcgtgtacccggt

SEQ ID NO: 2300 - DNA, 18 bp, Homo sapiens
acgccggagacgtaggag

SEQ ID NO: 2301 - DNA, 21 bp, Homo sapiens
acgccggagacgtaggagtgg

SEQ ID NO: 2302 - DNA, 18 bp, Homo sapiens
acgccggccaagacagca

SEQ ID NO: 2303 - DNA, 16 bp, Homo sapiens
acgccgggaacaggtg

SEQ ID NO: 2304 - DNA, 19 bp, Homo sapiens
acgccgggactcccgccgc

SEQ ID NO: 2305 - DNA, 18 bp, Homo sapiens
acgccgtccctcctcggc

SEQ ID NO: 2306 - DNA, 20 bp, Homo sapiens
acgcctcgctggagcaggca

SEQ ID NO: 2307 - DNA, 18 bp, Homo sapiens
acgcctgcagagccgggc

SEQ ID NO: 2308 - DNA, 18 bp, Homo sapiens
acgcctttccagtactgc

SEQ ID NO: 2309 - DNA, 20 bp, Homo sapiens
acgcgacgatctcagcggat

SEQ ID NO: 2310 - DNA, 16 bp, Homo sapiens
acgcgacgcggaggtt

SEQ ID NO: 2311 - DNA, 18 bp, Homo sapiens
acgcgagtgggagcacca

SEQ ID NO: 2312 - DNA, 22 bp, Homo sapiens
acgcgagtgggagcaccaggat

SEQ ID NO: 2313 - DNA, 19 bp, Homo sapiens
acgcgatgaagcccagacc

SEQ ID NO: 2314 - DNA, 18 bp, Homo sapiens
acgcgccagggctgtccc

SEQ ID NO: 2315 - DNA, 17 bp, Homo sapiens
acgcgcctccgccgccc

SEQ ID NO: 2316 - DNA, 15 bp, Homo sapiens
acgcgcctggcgcgg

SEQ ID NO: 2317 - DNA, 18 bp, Homo sapiens
acgcgcgctgcaggagcg

SEQ ID NO: 2318 - DNA, 24 bp, Homo sapiens
acgcgcgctgcaggagcgcggaac

SEQ ID NO: 2319 - DNA, 18 bp, Homo sapiens
acgcgcggagggtccggg

SEQ ID NO: 2320 - DNA, 17 bp, Homo sapiens
acgcgcggcggcagcaa

SEQ ID NO: 2321 - DNA, 18 bp, Homo sapiens
acgcggacgcaccggcta

SEQ ID NO: 2322 - DNA, 20 bp, Homo sapiens
acgcggagagtcgccgcctg

SEQ ID NO: 2323 - DNA, 17 bp, Homo sapiens
acgcggagcggacggat

SEQ ID NO: 2324 - DNA, 19 bp, Homo sapiens
acgcggagggaaggagcta

SEQ ID NO: 2325 - DNA, 20 bp, Homo sapiens
acgcggaggtttcggagcac

SEQ ID NO: 2326 - DNA, 18 bp, Homo sapiens
acgcggagttgcgccgcc

SEQ ID NO: 2327 - DNA, 21 bp, Homo sapiens
acgcggccccggccgcaccac

SEQ ID NO: 2328 - DNA, 20 bp, Homo sapiens
acgcggctggcagcggacag

SEQ ID NO: 2329 - DNA, 18 bp, Homo sapiens
acgcgggagcagggtgcg

SEQ ID NO: 2330 - DNA, 18 bp, Homo sapiens
acgcgggcggcgagacgg

SEQ ID NO: 2331 - DNA, 19 bp, Homo sapiens
acgcgggcggcgagacggc

SEQ ID NO: 2332 - DNA, 18 bp, Homo sapiens
gaggtagagagacgccag

SEQ ID NO: 2333 - DNA, 19 bp, Homo sapiens
gaggtagcaagatggccgc

SEQ ID NO: 2334 - DNA, 20 bp, Homo sapiens
gaggtagcttctggaaggcg

SEQ ID NO: 2335 - DNA, 19 bp, Homo sapiens
gaggtcaggctgtaaccgg

SEQ ID NO: 2336 - DNA, 17 bp, Homo sapiens
gaggtcagggcgagcgt

SEQ ID NO: 2337 - DNA, 18 bp, Homo sapiens
gaggtcctcaggaagaag

SEQ ID NO: 2338 - DNA, 17 bp, Homo sapiens
gaggtcggaaaaaaggg

SEQ ID NO: 2339 - DNA, 18 bp, Homo sapiens
gaggtcggagcggaagga

SEQ ID NO: 2340 - DNA, 20 bp, Homo sapiens
gaggtcggagcggaaggacg

SEQ ID NO: 2341 - DNA, 17 bp, Homo sapiens
gaggtcgtctgagccct

SEQ ID NO: 2342 - DNA, 22 bp, Homo sapiens
gaggtctgaagggggacaggtc

SEQ ID NO: 2343 - DNA, 18 bp, Homo sapiens
gaggtgagctttttcaga

SEQ ID NO: 2344 - DNA, 18 bp, Homo sapiens
gaggtgagggagactggg

SEQ ID NO: 2345 - DNA, 18 bp, Homo sapiens
gaggtgagggcgagctgg

SEQ ID NO: 2346 - DNA, 16 bp, Homo sapiens
gaggtgaggggtcggc

SEQ ID NO: 2347 - DNA, 20 bp, Homo sapiens
gaggtgatcagaaggcaaag

SEQ ID NO: 2348 - DNA, 18 bp, Homo sapiens
gaggtgatccgcgcggcg

SEQ ID NO: 2349 - DNA, 18 bp, Homo sapiens
gaggtgctgggcaggagg

SEQ ID NO: 2350 - DNA, 20 bp, Homo sapiens
gaggtggcagcgggtaccga

SEQ ID NO: 2351 - DNA, 19 bp, Homo sapiens
gaggtggccccgcgctgcc

SEQ ID NO: 2352 - DNA, 17 bp, Homo sapiens
gaggtggcggcggcggg

SEQ ID NO: 2353 - DNA, 20 bp, Homo sapiens
gaggtggcggcggcgggaag

SEQ ID NO: 2354 - DNA, 18 bp, Homo sapiens
gaggtggctgcggcagct

SEQ ID NO: 2355 - DNA, 19 bp, Homo sapiens
gaggtgtcagggctgggag

SEQ ID NO: 2356 - DNA, 24 bp, Homo sapiens
gaggttcgtgcgcgtctggtggcg

SEQ ID NO: 2357 - DNA, 18 bp, Homo sapiens
gaggttgctgcagttttt

SEQ ID NO: 2358 - DNA, 18 bp, Homo sapiens
gagtagcagccggacgag

SEQ ID NO: 2359 - DNA, 17 bp, Homo sapiens
gagtagcccctctacct

SEQ ID NO: 2360 - DNA, 21 bp, Homo sapiens
gagtagccggtgctgagagaa

SEQ ID NO: 2361 - DNA, 21 bp, Homo sapiens
gagtaggcagcgttgggccca

SEQ ID NO: 2362 - DNA, 16 bp, Homo sapiens
gagtagtcgggcgggg

SEQ ID NO: 2363 - DNA, 19 bp, Homo sapiens
gagtcaagatggaggagta

SEQ ID NO: 2364 - DNA, 18 bp, Homo sapiens
gagtccaaaacaggccta

SEQ ID NO: 2365 - DNA, 17 bp, Homo sapiens
gagtccagtggctgcaa

SEQ ID NO: 2366 - DNA, 18 bp, Homo sapiens
gagtcccaggtgagcggg

SEQ ID NO: 2367 - DNA, 17 bp, Homo sapiens
gagtcccgggcgggctg

SEQ ID NO: 2368 - DNA, 21 bp, Homo sapiens
gagtccctgcgggttaggggc

SEQ ID NO: 2369 - DNA, 22 bp, Homo sapiens
gagtccggcggctcctctatca

SEQ ID NO: 2370 - DNA, 18 bp, Homo sapiens
gagtccgggcagagcttg

SEQ ID NO: 2371 - DNA, 20 bp, Homo sapiens
gagtccggtgaaggggcggc

SEQ ID NO: 2372 - DNA, 18 bp, Homo sapiens
gagtcgcagaaagaggca

SEQ ID NO: 2373 - DNA, 16 bp, Homo sapiens
gagtcgctgaggaggc

SEQ ID NO: 2374 - DNA, 20 bp, Homo sapiens
gagtcggagtcggagtcgga

SEQ ID NO: 2375 - DNA, 19 bp, Homo sapiens
gagtcgtagggaggacgcc

SEQ ID NO: 2376 - DNA, 18 bp, Homo sapiens
gagtcgtctttcctttgc

SEQ ID NO: 2377 - DNA, 19 bp, Homo sapiens
gagtctcgctttttctttc

SEQ ID NO: 2378 - DNA, 17 bp, Homo sapiens
gagtgaacggtgtggag

SEQ ID NO: 2379 - DNA, 18 bp, Homo sapiens
gagtgaacggtgtggagc

SEQ ID NO: 2380 - DNA, 19 bp, Homo sapiens
gagtgaattgatccgggag

SEQ ID NO: 2381 - DNA, 23 bp, Homo sapiens
gagtgactctagggcagccgcat

SEQ ID NO: 2382 - DNA, 15 bp, Homo sapiens
gagtgagacggcggc

SEQ ID NO: 2383 - DNA, 21 bp, Homo sapiens
gagtgagagagttggttggtg

SEQ ID NO: 2384 - DNA, 23 bp, Homo sapiens
gagtgagctgtagttccgtggca

SEQ ID NO: 2385 - DNA, 21 bp, Homo sapiens
gagtgagtatgggtggcggag

SEQ ID NO: 2386 - DNA, 16 bp, Homo sapiens
gagtgatcgtgtggaa

SEQ ID NO: 2387 - DNA, 17 bp, Homo sapiens
gagtgatcgtgtggaat

SEQ ID NO: 2388 - DNA, 20 bp, Homo sapiens
gagtgatggctgccggcgct

SEQ ID NO: 2389 - DNA, 16 bp, Homo sapiens
acgcggtggcagagcc

SEQ ID NO: 2390 - DNA, 18 bp, Homo sapiens
acgcggtgggccgcccct

SEQ ID NO: 2391 - DNA, 16 bp, Homo sapiens
acgcgtagtaggacgg

SEQ ID NO: 2392 - DNA, 19 bp, Homo sapiens
acgcgtagtaggacggtag

SEQ ID NO: 2393 - DNA, 22 bp, Homo sapiens
acgcgttaccgcacgctcgcgc

SEQ ID NO: 2394 - DNA, 20 bp, Homo sapiens
acgcgttactttggctaaaa

SEQ ID NO: 2395 - DNA, 20 bp, Homo sapiens
acgctaccgggagctggtca

SEQ ID NO: 2396 - DNA, 23 bp, Homo sapiens
acgctcccggcggctgtggcggc

SEQ ID NO: 2397 - DNA, 18 bp, Homo sapiens
acgctccgcattgcagac

SEQ ID NO: 2398 - DNA, 21 bp, Homo sapiens
acgctcctgagagaagggcgc

SEQ ID NO: 2399 - DNA, 17 bp, Homo sapiens
acgctcgcgcctttccc

SEQ ID NO: 2400 - DNA, 18 bp, Homo sapiens
acgctcggtgagaggcgg

SEQ ID NO: 2401 - DNA, 17 bp, Homo sapiens
acgctctcgaggactac

SEQ ID NO: 2402 - DNA, 19 bp, Homo sapiens
acgctgaaggtaaagggac

SEQ ID NO: 2403 - DNA, 18 bp, Homo sapiens
acgctgaggtcggtcgga

SEQ ID NO: 2404 - DNA, 20 bp, Homo sapiens
acgctgcacgaccccgcgcc

SEQ ID NO: 2405 - DNA, 20 bp, Homo sapiens
acgctgcagcaggcggggca

SEQ ID NO: 2406 - DNA, 18 bp, Homo sapiens
acgctggcggtggacgca

SEQ ID NO: 2407 - DNA, 16 bp, Homo sapiens
acgcttcactggaccc

SEQ ID NO: 2408 - DNA, 20 bp, Homo sapiens
acgcttgcgggatagggagg

SEQ ID NO: 2409 - DNA, 18 bp, Homo sapiens
acggaaagggagacgccg

SEQ ID NO: 2410 - DNA, 19 bp, Homo sapiens
acggaaagggagacgccgc

SEQ ID NO: 2411 - DNA, 18 bp, Homo sapiens
acggaactcggcatcagg

SEQ ID NO: 2412 - DNA, 22 bp, Homo sapiens
acggaactcggctgcggctcca

SEQ ID NO: 2413 - DNA, 17 bp, Homo sapiens
acggaaggagcatggcg

SEQ ID NO: 2414 - DNA, 17 bp, Homo sapiens
acggaaggagcggcggc

SEQ ID NO: 2415 - DNA, 19 bp, Homo sapiens
acggaagtgtaggttacgg

SEQ ID NO: 2416 - DNA, 21 bp, Homo sapiens
acggaatggaggaggtgcctc

SEQ ID NO: 2417 - DNA, 18 bp, Homo sapiens
acggaattcgggaccgac

SEQ ID NO: 2418 - DNA, 18 bp, Homo sapiens
acggacagagcggtagcg

SEQ ID NO: 2419 - DNA, 19 bp, Homo sapiens
acggacagagcggtagcgc

SEQ ID NO: 2420 - DNA, 17 bp, Homo sapiens
acggaccagagcaggta

SEQ ID NO: 2421 - DNA, 18 bp, Homo sapiens
acggaccttctggctgta

SEQ ID NO: 2422 - DNA, 18 bp, Homo sapiens
acggacgcttcggccgta

SEQ ID NO: 2423 - DNA, 21 bp, Homo sapiens
acggactgacagacggactcc

SEQ ID NO: 2424 - DNA, 19 bp, Homo sapiens
acggagaacggaaaggaga

SEQ ID NO: 2425 - DNA, 18 bp, Homo sapiens
acggagagcgaaggggac

SEQ ID NO: 2426 - DNA, 18 bp, Homo sapiens
acggagaggcggaaagga

SEQ ID NO: 2427 - DNA, 18 bp, Homo sapiens
acggagcgacagagcgag

SEQ ID NO: 2428 - DNA, 18 bp, Homo sapiens
acggagcgagcgggcgtg

SEQ ID NO: 2429 - DNA, 15 bp, Homo sapiens
acggagcggacgcca

SEQ ID NO: 2430 - DNA, 18 bp, Homo sapiens
acggagcggacgccatgg

SEQ ID NO: 2431 - DNA, 18 bp, Homo sapiens
acggaggaccggagcggc

SEQ ID NO: 2432 - DNA, 17 bp, Homo sapiens
acggaggaggaggatgg

SEQ ID NO: 2433 - DNA, 19 bp, Homo sapiens
acggaggtgcggcgccgac

SEQ ID NO: 2434 - DNA, 17 bp, Homo sapiens
acggagtgcatcggacg

SEQ ID NO: 2435 - DNA, 18 bp, Homo sapiens
acggagtgcatcggacgt

SEQ ID NO: 2436 - DNA, 16 bp, Homo sapiens
acggatagactggggg

SEQ ID NO: 2437 - DNA, 18 bp, Homo sapiens
acggatcatcagaaggcg

SEQ ID NO: 2438 - DNA, 17 bp, Homo sapiens
acggcagctgccaggga

SEQ ID NO: 2439 - DNA, 18 bp, Homo sapiens
acggcagggacacgcgga

SEQ ID NO: 2440 - DNA, 19 bp, Homo sapiens
acggcatggggcgagcgga

SEQ ID NO: 2441 - DNA, 18 bp, Homo sapiens
acggccacggcagggaca

SEQ ID NO: 2442 - DNA, 18 bp, Homo sapiens
acggccaggcggggctgg

SEQ ID NO: 2443 - DNA, 18 bp, Homo sapiens
acggccgagaccggagga

SEQ ID NO: 2444 - DNA, 19 bp, Homo sapiens
acggccgtctctggagagc

SEQ ID NO: 2445 - DNA, 17 bp, Homo sapiens
acggcgaaatgagactg

SEQ ID NO: 2446 - DNA, 18 bp, Homo sapiens
gagtgcacagaagaactt

SEQ ID NO: 2447 - DNA, 18 bp, Homo sapiens
gagtgcactgaagatggc

SEQ ID NO: 2448 - DNA, 20 bp, Homo sapiens
gagtgcagggaagtggagta

SEQ ID NO: 2449 - DNA, 18 bp, Homo sapiens
gagtgccaggctgggcca

SEQ ID NO: 2450 - DNA, 18 bp, Homo sapiens
gagtgcggggcccgaggt

SEQ ID NO: 2451 - DNA, 18 bp, Homo sapiens
gagtgcgggtcggttctg

SEQ ID NO: 2452 - DNA, 20 bp, Homo sapiens
gagtggaaggtggtggctgc

SEQ ID NO: 2453 - DNA, 17 bp, Homo sapiens
gagtggacgtcattgcc

SEQ ID NO: 2454 - DNA, 17 bp, Homo sapiens
gagtggcgggccgactg

SEQ ID NO: 2455 - DNA, 17 bp, Homo sapiens
gagtgggactcggccca

SEQ ID NO: 2456 - DNA, 18 bp, Homo sapiens
gagtgggagaagagcgga

SEQ ID NO: 2457 - DNA, 17 bp, Homo sapiens
gagtgggagcgagacgg

SEQ ID NO: 2458 - DNA, 17 bp, Homo sapiens
gagtgggcatagacact

SEQ ID NO: 2459 - DNA, 18 bp, Homo sapiens
gagtgggccagagatggc

SEQ ID NO: 2460 - DNA, 16 bp, Homo sapiens
gagtgggccggacgag

SEQ ID NO: 2461 - DNA, 17 bp, Homo sapiens
gagtgtcgcgtctgcag

SEQ ID NO: 2462 - DNA, 17 bp, Homo sapiens
gagtgtcgtggacgccg

SEQ ID NO: 2463 - DNA, 18 bp, Homo sapiens
gagtgtctcctgataccc

SEQ ID NO: 2464 - DNA, 16 bp, Homo sapiens
gagtgtggtcaggcgg

SEQ ID NO: 2465 - DNA, 18 bp, Homo sapiens
gagtgtggtcaggcggct

SEQ ID NO: 2466 - DNA, 18 bp, Homo sapiens
gagtgttggcgggtggcg

SEQ ID NO: 2467 - DNA, 19 bp, Homo sapiens
gagttccagaataggccac

SEQ ID NO: 2468 - DNA, 18 bp, Homo sapiens
gagttccagcagtccgcg

SEQ ID NO: 2469 - DNA, 18 bp, Homo sapiens
gagttcgaggtggcagag

SEQ ID NO: 2470 - DNA, 22 bp, Homo sapiens
gagttcggagtagagatggccg

SEQ ID NO: 2471 - DNA, 20 bp, Homo sapiens
gagttcttgggagatgggca

SEQ ID NO: 2472 - DNA, 20 bp, Homo sapiens
gagttgtaggcgagaggtga

SEQ ID NO: 2473 - DNA, 19 bp, Homo sapiens
gagtttcccgggcactcac

SEQ ID NO: 2474 - DNA, 18 bp, Homo sapiens
gagtttgagatcgtggac

SEQ ID NO: 2475 - DNA, 16 bp, Homo sapiens
gagtttgagtttatgg

SEQ ID NO: 2476 - DNA, 16 bp, Homo sapiens
gagtttgggcgccagg

SEQ ID NO: 2477 - DNA, 17 bp, Homo sapiens
gagttttccttgcgctc

SEQ ID NO: 2478 - DNA, 18 bp, Homo sapiens
gagttttctcggacagtg

SEQ ID NO: 2479 - DNA, 19 bp, Homo sapiens
gataaaccgtacgtccgtt

SEQ ID NO: 2480 - DNA, 19 bp, Homo sapiens
gataatgtcaggacgcggc

SEQ ID NO: 2481 - DNA, 18 bp, Homo sapiens
gatacgcgacgcgtagca

SEQ ID NO: 2482 - DNA, 18 bp, Homo sapiens
gatacggcggccgcaggg

SEQ ID NO: 2483 - DNA, 19 bp, Homo sapiens
gatagcgcggcggtgtgga

SEQ ID NO: 2484 - DNA, 19 bp, Homo sapiens
gataggcctgtgacgaagg

SEQ ID NO: 2485 - DNA, 16 bp, Homo sapiens
gatatcgggtggcggc

SEQ ID NO: 2486 - DNA, 16 bp, Homo sapiens
gatatggaggatctct

SEQ ID NO: 2487 - DNA, 17 bp, Homo sapiens
gatattttgttggcata

SEQ ID NO: 2488 - DNA, 23 bp, Homo sapiens
gatcagatgatcctgttgtggac

SEQ ID NO: 2489 - DNA, 18 bp, Homo sapiens
gatcagtgcgatacataa

SEQ ID NO: 2490 - DNA, 17 bp, Homo sapiens
gatccaaaagctcggca

SEQ ID NO: 2491 - DNA, 14 bp, Homo sapiens
gatcccagcgcgca

SEQ ID NO: 2492 - DNA, 19 bp, Homo sapiens
gatccgcggcggccggaga

SEQ ID NO: 2493 - DNA, 20 bp, Homo sapiens
gatccggagagtggccgggc

SEQ ID NO: 2494 - DNA, 18 bp, Homo sapiens
gatcctgaaccagccgcc

SEQ ID NO: 2495 - DNA, 18 bp, Homo sapiens
gatcgagtagtgtaagtg

SEQ ID NO: 2496 - DNA, 18 bp, Homo sapiens
gatcgcagtccggaggtg

SEQ ID NO: 2497 - DNA, 20 bp, Homo sapiens
gatctgactggcggtttccc

SEQ ID NO: 2498 - DNA, 23 bp, Homo sapiens
gatctgggctcgggttgaggagt

SEQ ID NO: 2499 - DNA, 19 bp, Homo sapiens
gatgaaggctagtaaatgg

SEQ ID NO: 2500 - DNA, 18 bp, Homo sapiens
gatgaagggctggcagta

SEQ ID NO: 2501 - DNA, 18 bp, Homo sapiens
gatgacgttgccagaagc

SEQ ID NO: 2502 - DNA, 17 bp, Homo sapiens
gatgactggacggtgag

SEQ ID NO: 2503 - DNA, 19 bp, Homo sapiens
acggcgaaatgagactgtt

SEQ ID NO: 2504 - DNA, 17 bp, Homo sapiens
acggcgacgggagccgg

SEQ ID NO: 2505 - DNA, 18 bp, Homo sapiens
acggcgccggagagatgg

SEQ ID NO: 2506 - DNA, 24 bp, Homo sapiens
acggcgcgacaagatggcggtgag

SEQ ID NO: 2507 - DNA, 19 bp, Homo sapiens
acggcggaagcggagagca

SEQ ID NO: 2508 - DNA, 20 bp, Homo sapiens
acggcggcggccatggcgca

SEQ ID NO: 2509 - DNA, 18 bp, Homo sapiens
acggcggcggcgagccgg

SEQ ID NO: 2510 - DNA, 18 bp, Homo sapiens
acggcggcggcggccttg

SEQ ID NO: 2511 - DNA, 19 bp, Homo sapiens
acggcggcggtgtcggcag

SEQ ID NO: 2512 - DNA, 18 bp, Homo sapiens
acggcgtggaggctttgc

SEQ ID NO: 2513 - DNA, 18 bp, Homo sapiens
acggcgtggagtgactat

SEQ ID NO: 2514 - DNA, 23 bp, Homo sapiens
acggcgtggccgccatcttgctt

SEQ ID NO: 2515 - DNA, 18 bp, Homo sapiens
acggctagagacgcccag

SEQ ID NO: 2516 - DNA, 18 bp, Homo sapiens
acggctgaggcgggagac

SEQ ID NO: 2517 - DNA, 23 bp, Homo sapiens
acggctgcagaacatccgccgca

SEQ ID NO: 2518 - DNA, 20 bp, Homo sapiens
acggctgcagccggcgccgc

SEQ ID NO: 2519 - DNA, 19 bp, Homo sapiens
acgggacccggacgagtgg

SEQ ID NO: 2520 - DNA, 17 bp, Homo sapiens
acgggactgggaagggg

SEQ ID NO: 2521 - DNA, 18 bp, Homo sapiens
acgggactgggaagggga

SEQ ID NO: 2522 - DNA, 19 bp, Homo sapiens
acgggactgggaaggggac

SEQ ID NO: 2523 - DNA, 22 bp, Homo sapiens
acgggactgggaaggggaccca

SEQ ID NO: 2524 - DNA, 18 bp, Homo sapiens
acgggagcgccgcaccgg

SEQ ID NO: 2525 - DNA, 18 bp, Homo sapiens
acgggaggacgcgaggcc

SEQ ID NO: 2526 - DNA, 21 bp, Homo sapiens
acgggaggacgcgaggccccg

SEQ ID NO: 2527 - DNA, 20 bp, Homo sapiens
acgggaggatctgaagccgg

SEQ ID NO: 2528 - DNA, 16 bp, Homo sapiens
acgggaggcactactg

SEQ ID NO: 2529 - DNA, 17 bp, Homo sapiens
acgggagtactgcgacg

SEQ ID NO: 2530 - DNA, 17 bp, Homo sapiens
acgggagtagaaggagg

SEQ ID NO: 2531 - DNA, 17 bp, Homo sapiens
acgggagtcagacgctg

SEQ ID NO: 2532 - DNA, 17 bp, Homo sapiens
acgggatggcggaggcg

SEQ ID NO: 2533 - DNA, 20 bp, Homo sapiens
acgggatggggagctggacc

SEQ ID NO: 2534 - DNA, 22 bp, Homo sapiens
acgggcacgttactccgtccga

SEQ ID NO: 2535 - DNA, 16 bp, Homo sapiens
acgggcaggaaaccat

SEQ ID NO: 2536 - DNA, 18 bp, Homo sapiens
acgggcaggaaaccatta

SEQ ID NO: 2537 - DNA, 18 bp, Homo sapiens
acgggcagtgggaggagc

SEQ ID NO: 2538 - DNA, 18 bp, Homo sapiens
acgggccaccgtggagtc

SEQ ID NO: 2539 - DNA, 20 bp, Homo sapiens
acgggcggcgggagctgggg

SEQ ID NO: 2540 - DNA, 18 bp, Homo sapiens
acgggcggtcgagcagaa

SEQ ID NO: 2541 - DNA, 18 bp, Homo sapiens
acgggctctgccataggc

SEQ ID NO: 2542 - DNA, 19 bp, Homo sapiens
acgggctggaactggcagg

SEQ ID NO: 2543 - DNA, 18 bp, Homo sapiens
acgggctggttggggctg

SEQ ID NO: 2544 - DNA, 16 bp, Homo sapiens
acgggcttcgggtcgg

SEQ ID NO: 2545 - DNA, 19 bp, Homo sapiens
acggggagtgttaccgggg

SEQ ID NO: 2546 - DNA, 17 bp, Homo sapiens
acggggcgaacatggcg

SEQ ID NO: 2547 - DNA, 19 bp, Homo sapiens
acgggggaaaggagacgct

SEQ ID NO: 2548 - DNA, 17 bp, Homo sapiens
acgggggagacggagcc

SEQ ID NO: 2549 - DNA, 18 bp, Homo sapiens
acgggggagacggagccc

SEQ ID NO: 2550 - DNA, 18 bp, Homo sapiens
acgggggtcggggacgca

SEQ ID NO: 2551 - DNA, 18 bp, Homo sapiens
acgggtaaagtggcttct

SEQ ID NO: 2552 - DNA, 17 bp, Homo sapiens
acgggtctgggcggctc

SEQ ID NO: 2553 - DNA, 16 bp, Homo sapiens
acggtaagctggggta

SEQ ID NO: 2554 - DNA, 18 bp, Homo sapiens
acggtaagctggggtatg

SEQ ID NO: 2555 - DNA, 18 bp, Homo sapiens
acggtagggacgggaggc

SEQ ID NO: 2556 - DNA, 19 bp, Homo sapiens
acggtagggacgggaggcg

SEQ ID NO: 2557 - DNA, 22 bp, Homo sapiens
acggtccgcgcgctctctggca

SEQ ID NO: 2558 - DNA, 20 bp, Homo sapiens
acggtcctgcctcccgacac

SEQ ID NO: 2559 - DNA, 17 bp, Homo sapiens
acggtcgcgcggccgtc

SEQ ID NO: 2560 - DNA, 18 bp, Homo sapiens
gatgacttcgcgggacag

SEQ ID NO: 2561 - DNA, 21 bp, Homo sapiens
gatgaggaggagccggagacg

SEQ ID NO: 2562 - DNA, 22 bp, Homo sapiens
gatgaggaggtcggcgcggctg

SEQ ID NO: 2563 - DNA, 21 bp, Homo sapiens
gatgcagagggcagtaagata

SEQ ID NO: 2564 - DNA, 18 bp, Homo sapiens
gatgcaggaactgtatag

SEQ ID NO: 2565 - DNA, 22 bp, Homo sapiens
gatgcccctgccgccctgacgc

SEQ ID NO: 2566 - DNA, 18 bp, Homo sapiens
gatgcggaaacccctggc

SEQ ID NO: 2567 - DNA, 16 bp, Homo sapiens
gatgcggcgcggcgat

SEQ ID NO: 2568 - DNA, 18 bp, Homo sapiens
gatgctcctcagctctgg

SEQ ID NO: 2569 - DNA, 18 bp, Homo sapiens
gatgctgaggcgcagagt

SEQ ID NO: 2570 - DNA, 18 bp, Homo sapiens
gatggaagactaccaggc

SEQ ID NO: 2571 - DNA, 17 bp, Homo sapiens
gatggacgtccacgatc

SEQ ID NO: 2572 - DNA, 18 bp, Homo sapiens
gatggagatggcggctgc

SEQ ID NO: 2573 - DNA, 18 bp, Homo sapiens
gatggaggagagcgggta

SEQ ID NO: 2574 - DNA, 18 bp, Homo sapiens
gatggccgcccccgtgga

SEQ ID NO: 2575 - DNA, 18 bp, Homo sapiens
gatggcgacggcggccta

SEQ ID NO: 2576 - DNA, 18 bp, Homo sapiens
gatggcgctctgcacggc

SEQ ID NO: 2577 - DNA, 16 bp, Homo sapiens
gatggcggaaatggat

SEQ ID NO: 2578 - DNA, 18 bp, Homo sapiens
gatggcggaagcggagtg

SEQ ID NO: 2579 - DNA, 19 bp, Homo sapiens
gatggcggaagcggagtga

SEQ ID NO: 2580 - DNA, 18 bp, Homo sapiens
gatggcggacggaaaggg

SEQ ID NO: 2581 - DNA, 18 bp, Homo sapiens
gatggcggagcaagagtg

SEQ ID NO: 2582 - DNA, 20 bp, Homo sapiens
gatggcggagcaagagtgag

SEQ ID NO: 2583 - DNA, 19 bp, Homo sapiens
gatggcggcagggaccagc

SEQ ID NO: 2584 - DNA, 20 bp, Homo sapiens
gatggcggcagggaccagca

SEQ ID NO: 2585 - DNA, 17 bp, Homo sapiens
gatggcggcctgaacgc

SEQ ID NO: 2586 - DNA, 21 bp, Homo sapiens
gatggcggcgcccagaggctg

SEQ ID NO: 2587 - DNA, 19 bp, Homo sapiens
gatggcggcgcccgtaagg

SEQ ID NO: 2588 - DNA, 20 bp, Homo sapiens
gatggcggcgctaggggaac

SEQ ID NO: 2589 - DNA, 18 bp, Homo sapiens
gatggcggcgctgaagga

SEQ ID NO: 2590 - DNA, 16 bp, Homo sapiens
gatggcggcggaaacg

SEQ ID NO: 2591 - DNA, 18 bp, Homo sapiens
gatggcggcgggttgctg

SEQ ID NO: 2592 - DNA, 21 bp, Homo sapiens
gatggcggcggtagcggcagt

SEQ ID NO: 2593 - DNA, 22 bp, Homo sapiens
gatggcggctgcggctgagtga

SEQ ID NO: 2594 - DNA, 18 bp, Homo sapiens
gatggcgggggctggttc

SEQ ID NO: 2595 - DNA, 18 bp, Homo sapiens
gatggcggtgcccggcga

SEQ ID NO: 2596 - DNA, 16 bp, Homo sapiens
gatggcggtggagtcg

SEQ ID NO: 2597 - DNA, 18 bp, Homo sapiens
gatggctgaaggggatac

SEQ ID NO: 2598 - DNA, 20 bp, Homo sapiens
gatggctgcgcccgagaaga

SEQ ID NO: 2599 - DNA, 17 bp, Homo sapiens
gatgggctctgaggcgg

SEQ ID NO: 2600 - DNA, 18 bp, Homo sapiens
gatggtgagtcggggata

SEQ ID NO: 2601 - DNA, 17 bp, Homo sapiens
gatggtggtcggagcgc

SEQ ID NO: 2602 - DNA, 16 bp, Homo sapiens
gatgtaaaccggacca

SEQ ID NO: 2603 - DNA, 18 bp, Homo sapiens
gatgtcatgcaggcaaga

SEQ ID NO: 2604 - DNA, 18 bp, Homo sapiens
gatgtggacaagagaggt

SEQ ID NO: 2605 - DNA, 20 bp, Homo sapiens
gatgtggctccgtgccttta

SEQ ID NO: 2606 - DNA, 19 bp, Homo sapiens
gatgttcactcctgggcac

SEQ ID NO: 2607 - DNA, 18 bp, Homo sapiens
gatgttgacggggtccta

SEQ ID NO: 2608 - DNA, 18 bp, Homo sapiens
gatgttgggcggccacag

SEQ ID NO: 2609 - DNA, 22 bp, Homo sapiens
gattaagcggcttgggagaggg

SEQ ID NO: 2610 - DNA, 22 bp, Homo sapiens
gattcacggcgaaatgagactg

SEQ ID NO: 2611 - DNA, 19 bp, Homo sapiens
gattcagttgtttgcgggc

SEQ ID NO: 2612 - DNA, 18 bp, Homo sapiens
gattcctgcagaggatca

SEQ ID NO: 2613 - DNA, 19 bp, Homo sapiens
gattcgcagtggtcgcttc

SEQ ID NO: 2614 - DNA, 17 bp, Homo sapiens
gattcggcgcggctcat

SEQ ID NO: 2615 - DNA, 19 bp, Homo sapiens
gattcggcgggcaagcggg

SEQ ID NO: 2616 - DNA, 22 bp, Homo sapiens
gattgacctattggggtgtttc

SEQ ID NO: 2617 - DNA, 19 bp, Homo sapiens
acggtgctcagcaaccacc

SEQ ID NO: 2618 - DNA, 18 bp, Homo sapiens
acggtggccgacgggagt

SEQ ID NO: 2619 - DNA, 16 bp, Homo sapiens
acggtgtggagcggag

SEQ ID NO: 2620 - DNA, 17 bp, Homo sapiens
acggtgtggagcggagg

SEQ ID NO: 2621 - DNA, 18 bp, Homo sapiens
acggtgtggagcggaggc

SEQ ID NO: 2622 - DNA, 20 bp, Homo sapiens
acggtgtggagcggaggccg

SEQ ID NO: 2623 - DNA, 18 bp, Homo sapiens
acggtgtttggtggagcc

SEQ ID NO: 2624 - DNA, 17 bp, Homo sapiens
acggttcgtttttcctt

SEQ ID NO: 2625 - DNA, 17 bp, Homo sapiens
acggttgcaggcgtagc

SEQ ID NO: 2626 - DNA, 17 bp, Homo sapiens
acggttggagaagaagg

SEQ ID NO: 2627 - DNA, 18 bp, Homo sapiens
acggttggagaagaaggc

SEQ ID NO: 2628 - DNA, 19 bp, Homo sapiens
acggttggagaagaaggcg

SEQ ID NO: 2629 - DNA, 19 bp, Homo sapiens
acggtttcggtagcgacgg

SEQ ID NO: 2630 - DNA, 18 bp, Homo sapiens
acgtaaggccaggacggg

SEQ ID NO: 2631 - DNA, 18 bp, Homo sapiens
acgtagaccaggtaagtg

SEQ ID NO: 2632 - DNA, 21 bp, Homo sapiens
acgtagtccctcagtgcgcat

SEQ ID NO: 2633 - DNA, 18 bp, Homo sapiens
acgtatgaggaagaacgg

SEQ ID NO: 2634 - DNA, 17 bp, Homo sapiens
acgtattaaagggaccg

SEQ ID NO: 2635 - DNA, 18 bp, Homo sapiens
acgtcagtccccgcgctt

SEQ ID NO: 2636 - DNA, 17 bp, Homo sapiens
acgtccgtttgtccgga

SEQ ID NO: 2637 - DNA, 18 bp, Homo sapiens
acgtcgggtcgggtcagc

SEQ ID NO: 2638 - DNA, 18 bp, Homo sapiens
acgtgacgggtcggtggc

SEQ ID NO: 2639 - DNA, 20 bp, Homo sapiens
acgtgagaagggtcgggcca

SEQ ID NO: 2640 - DNA, 18 bp, Homo sapiens
acgtgcggagggagacgc

SEQ ID NO: 2641 - DNA, 18 bp, Homo sapiens
acgtgcggggcggaacgc

SEQ ID NO: 2642 - DNA, 20 bp, Homo sapiens
acgtgcggggcggaacgcgc

SEQ ID NO: 2643 - DNA, 19 bp, Homo sapiens
acgtgcttgtgttgactgg

SEQ ID NO: 2644 - DNA, 18 bp, Homo sapiens
acgtggacttgggcggtg

SEQ ID NO: 2645 - DNA, 16 bp, Homo sapiens
acgtggatggcgggaa

SEQ ID NO: 2646 - DNA, 18 bp, Homo sapiens
acgtggatggcgggaatt

SEQ ID NO: 2647 - DNA, 17 bp, Homo sapiens
acgtgggagcttggccg

SEQ ID NO: 2648 - DNA, 19 bp, Homo sapiens
acgtgggcaggagggctgg

SEQ ID NO: 2649 - DNA, 21 bp, Homo sapiens
acgtgggcctcgccgagcccg

SEQ ID NO: 2650 - DNA, 16 bp, Homo sapiens
acgtggtgcagcgcat

SEQ ID NO: 2651 - DNA, 19 bp, Homo sapiens
acgtgtccgctgcagtcgc

SEQ ID NO: 2652 - DNA, 18 bp, Homo sapiens
acgtgtctctggggcgga

SEQ ID NO: 2653 - DNA, 18 bp, Homo sapiens
acgtgtctttcaggaaga

SEQ ID NO: 2654 - DNA, 18 bp, Homo sapiens
acgttcggagggtggcct

SEQ ID NO: 2655 - DNA, 19 bp, Homo sapiens
acgttgacaagtggatcca

SEQ ID NO: 2656 - DNA, 18 bp, Homo sapiens
acgttggacgacaaagat

SEQ ID NO: 2657 - DNA, 20 bp, Homo sapiens
acgttggacgacaaagatgg

SEQ ID NO: 2658 - DNA, 18 bp, Homo sapiens
actaaaatggaggctggt

SEQ ID NO: 2659 - DNA, 17 bp, Homo sapiens
actaatgggacggaggg

SEQ ID NO: 2660 - DNA, 18 bp, Homo sapiens
actaccgggctggcaggg

SEQ ID NO: 2661 - DNA, 18 bp, Homo sapiens
actagacgaacagtccgg

SEQ ID NO: 2662 - DNA, 18 bp, Homo sapiens
actagccggaggtcggag

SEQ ID NO: 2663 - DNA, 20 bp, Homo sapiens
actagccggaggtcggagat

SEQ ID NO: 2664 - DNA, 18 bp, Homo sapiens
actagccgggcatggcca

SEQ ID NO: 2665 - DNA, 18 bp, Homo sapiens
actagctgcacatatcct

SEQ ID NO: 2666 - DNA, 17 bp, Homo sapiens
actaggtagtagcggca

SEQ ID NO: 2667 - DNA, 20 bp, Homo sapiens
actaggtgcgcacttcagtt

SEQ ID NO: 2668 - DNA, 16 bp, Homo sapiens
actatcgggcggctag

SEQ ID NO: 2669 - DNA, 20 bp, Homo sapiens
actatctttctagacaaggc

SEQ ID NO: 2670 - DNA, 19 bp, Homo sapiens
actcaaactttatcaggac

SEQ ID NO: 2671 - DNA, 18 bp, Homo sapiens
actcaaatgcagtcggct

SEQ ID NO: 2672 - DNA, 17 bp, Homo sapiens
actcaacgtgagacgca

SEQ ID NO: 2673 - DNA, 18 bp, Homo sapiens
actcaagatggcggcgtg

SEQ ID NO: 2674 - DNA, 19 bp, Homo sapiens
gattgcagcgggctggtcc

SEQ ID NO: 2675 - DNA, 20 bp, Homo sapiens
gattgggactgatacagagg

SEQ ID NO: 2676 - DNA, 18 bp, Homo sapiens
gattgtgcatgccgtggg

SEQ ID NO: 2677 - DNA, 18 bp, Homo sapiens
gattgttacgcacctgac

SEQ ID NO: 2678 - DNA, 18 bp, Homo sapiens
gatttgaaagattagaaa

SEQ ID NO: 2679 - DNA, 19 bp, Homo sapiens
gatttgctgctgcggacag

SEQ ID NO: 2680 - DNA, 17 bp, Homo sapiens
gatttggagacggagga

SEQ ID NO: 2681 - DNA, 17 bp, Homo sapiens
gatttgggagttgagca

SEQ ID NO: 2682 - DNA, 19 bp, Homo sapiens
gatttgggtcgcagttctt

SEQ ID NO: 2683 - DNA, 19 bp, Homo sapiens
gatttgtgtgtgcaccgcg

SEQ ID NO: 2684 - DNA, 19 bp, Homo sapiens
gattttggagtttctgggt

SEQ ID NO: 2685 - DNA, 18 bp, Homo sapiens
gcaaaatggcggatcatg

SEQ ID NO: 2686 - DNA, 18 bp, Homo sapiens
gcaaacaggtctgggagg

SEQ ID NO: 2687 - DNA, 17 bp, Homo sapiens
gcaaacctgaggtcctc

SEQ ID NO: 2688 - DNA, 18 bp, Homo sapiens
gcaaacgtcagtgtcggg

SEQ ID NO: 2689 - DNA, 18 bp, Homo sapiens
gcaaagaatggaggagtc

SEQ ID NO: 2690 - DNA, 18 bp, Homo sapiens
gcaaagacagagcgggca

SEQ ID NO: 2691 - DNA, 18 bp, Homo sapiens
gcaaaggcaaggaccgag

SEQ ID NO: 2692 - DNA, 20 bp, Homo sapiens
gcaaaggcaaggaccgaggg

SEQ ID NO: 2693 - DNA, 21 bp, Homo sapiens
gcaaaggcggaaagggactgg

SEQ ID NO: 2694 - DNA, 18 bp, Homo sapiens
gcaacaggttcgcgggcg

SEQ ID NO: 2695 - DNA, 18 bp, Homo sapiens
gcaacatcgcagccaagg

SEQ ID NO: 2696 - DNA, 19 bp, Homo sapiens
gcaacatcgcagccaaggc

SEQ ID NO: 2697 - DNA, 22 bp, Homo sapiens
gcaacgcaggctgctacggagc

SEQ ID NO: 2698 - DNA, 20 bp, Homo sapiens
gcaacggaggggaaataaaa

SEQ ID NO: 2699 - DNA, 17 bp, Homo sapiens
gcaactccaatgcctac

SEQ ID NO: 2700 - DNA, 18 bp, Homo sapiens
gcaactgcggcgcgtgag

SEQ ID NO: 2701 - DNA, 18 bp, Homo sapiens
gcaacttcctctagaggg

SEQ ID NO: 2702 - DNA, 18 bp, Homo sapiens
gcaagactaggcaacctc

SEQ ID NO: 2703 - DNA, 21 bp, Homo sapiens
gcaagagggcaaagaagctga

SEQ ID NO: 2704 - DNA, 18 bp, Homo sapiens
gcaagagtgctggagggc

SEQ ID NO: 2705 - DNA, 17 bp, Homo sapiens
gcaagatggcggacagt

SEQ ID NO: 2706 - DNA, 21 bp, Homo sapiens
gcaagatggcggacatctccc

SEQ ID NO: 2707 - DNA, 18 bp, Homo sapiens
gcaagatggcggcctgaa

SEQ ID NO: 2708 - DNA, 20 bp, Homo sapiens
gcaagatggcggcctgaacg

SEQ ID NO: 2709 - DNA, 18 bp, Homo sapiens
gcaagatggcggcgcgag

SEQ ID NO: 2710 - DNA, 19 bp, Homo sapiens
gcaagcatggtaggacttg

SEQ ID NO: 2711 - DNA, 17 bp, Homo sapiens
gcaagcccccggaggga

SEQ ID NO: 2712 - DNA, 18 bp, Homo sapiens
gcaagcggagctccccca

SEQ ID NO: 2713 - DNA, 18 bp, Homo sapiens
gcaagcgggcgagaggac

SEQ ID NO: 2714 - DNA, 20 bp, Homo sapiens
gcaaggagagctactctgtg

SEQ ID NO: 2715 - DNA, 16 bp, Homo sapiens
gcaaggaggaggctcg

SEQ ID NO: 2716 - DNA, 18 bp, Homo sapiens
gcaaggagggtttgtcac

SEQ ID NO: 2717 - DNA, 22 bp, Homo sapiens
gcaaggagtagcggaggggagg

SEQ ID NO: 2718 - DNA, 19 bp, Homo sapiens
gcaaggcgggcggagcgca

SEQ ID NO: 2719 - DNA, 18 bp, Homo sapiens
gcaaggcggtgtttctgg

SEQ ID NO: 2720 - DNA, 20 bp, Homo sapiens
gcaagggctcgagacgcagc

SEQ ID NO: 2721 - DNA, 19 bp, Homo sapiens
gcaagggcttgggaagtgc

SEQ ID NO: 2722 - DNA, 19 bp, Homo sapiens
gcaaggggcggcgcggagc

SEQ ID NO: 2723 - DNA, 18 bp, Homo sapiens
gcaagtaaccatagcggc

SEQ ID NO: 2724 - DNA, 18 bp, Homo sapiens
gcaatagcgagacgctgg

SEQ ID NO: 2725 - DNA, 20 bp, Homo sapiens
gcaatatccccacaagggcc

SEQ ID NO: 2726 - DNA, 19 bp, Homo sapiens
gcaatggaggaggaggatg

SEQ ID NO: 2727 - DNA, 19 bp, Homo sapiens
gcaatggcgtccgggctgg

SEQ ID NO: 2728 - DNA, 19 bp, Homo sapiens
gcaatgttctgggctgcga

SEQ ID NO: 2729 - DNA, 20 bp, Homo sapiens
gcaattttagccgtaatgtc

SEQ ID NO: 2730 - DNA, 18 bp, Homo sapiens
gcacaacccggacggaag

SEQ ID NO: 2731 - DNA, 18 bp, Homo sapiens
actcagacagtgcaggac

SEQ ID NO: 2732 - DNA, 18 bp, Homo sapiens
actcagggtggtgagtcc

SEQ ID NO: 2733 - DNA, 18 bp, Homo sapiens
actcagggttaggaggtc

SEQ ID NO: 2734 - DNA, 18 bp, Homo sapiens
actcatgactcggggagc

SEQ ID NO: 2735 - DNA, 18 bp, Homo sapiens
actcatttcagtatataa

SEQ ID NO: 2736 - DNA, 17 bp, Homo sapiens
actccaagggcggaccg

SEQ ID NO: 2737 - DNA, 17 bp, Homo sapiens
actcccaggatgcagtt

SEQ ID NO: 2738 - DNA, 18 bp, Homo sapiens
actcccgcctggccacca

SEQ ID NO: 2739 - DNA, 16 bp, Homo sapiens
actccctgctccgctg

SEQ ID NO: 2740 - DNA, 17 bp, Homo sapiens
actccgagcgtgagtcc

SEQ ID NO: 2741 - DNA, 20 bp, Homo sapiens
actccgcgctcacggcggcg

SEQ ID NO: 2742 - DNA, 19 bp, Homo sapiens
actccgctccaggcaggac

SEQ ID NO: 2743 - DNA, 21 bp, Homo sapiens
actccgtactccgtacttcgt

SEQ ID NO: 2744 - DNA, 20 bp, Homo sapiens
actcctccgttccttgggtc

SEQ ID NO: 2745 - DNA, 16 bp, Homo sapiens
actcctgcacggcgag

SEQ ID NO: 2746 - DNA, 17 bp, Homo sapiens
actcgaggctcggtgga

SEQ ID NO: 2747 - DNA, 19 bp, Homo sapiens
actcgcagagctgggctgg

SEQ ID NO: 2748 - DNA, 23 bp, Homo sapiens
actcgccgcagcctgcgcgcctt

SEQ ID NO: 2749 - DNA, 16 bp, Homo sapiens
actcggagctgctctg

SEQ ID NO: 2750 - DNA, 21 bp, Homo sapiens
actcggagctgctctgccgcg

SEQ ID NO: 2751 - DNA, 23 bp, Homo sapiens
actcggccccgcaccctacctgg

SEQ ID NO: 2752 - DNA, 21 bp, Homo sapiens
actcggccggtagtggagatg

SEQ ID NO: 2753 - DNA, 18 bp, Homo sapiens
actcggctgcccaggcgc

SEQ ID NO: 2754 - DNA, 17 bp, Homo sapiens
actcgggagccggagct

SEQ ID NO: 2755 - DNA, 18 bp, Homo sapiens
actcgtgcagctggggcg

SEQ ID NO: 2756 - DNA, 17 bp, Homo sapiens
actcgtgccacgccatg

SEQ ID NO: 2757 - DNA, 18 bp, Homo sapiens
actctggatcgagtagtg

SEQ ID NO: 2758 - DNA, 19 bp, Homo sapiens
actcttggcgaggtttttg

SEQ ID NO: 2759 - DNA, 18 bp, Homo sapiens
actgaacccgcaggagcg

SEQ ID NO: 2760 - DNA, 18 bp, Homo sapiens
actgaaggggtgaactag

SEQ ID NO: 2761 - DNA, 20 bp, Homo sapiens
actgagcggacaaacggaag

SEQ ID NO: 2762 - DNA, 19 bp, Homo sapiens
actgagcggagcccggtga

SEQ ID NO: 2763 - DNA, 16 bp, Homo sapiens
actgagcgggcgcagg

SEQ ID NO: 2764 - DNA, 18 bp, Homo sapiens
actgaggcgagccgggcg

SEQ ID NO: 2765 - DNA, 17 bp, Homo sapiens
actgaggtgtcggccgg

SEQ ID NO: 2766 - DNA, 21 bp, Homo sapiens
actgatctgcgtccgtttcac

SEQ ID NO: 2767 - DNA, 20 bp, Homo sapiens
actgatgcttcctggtccgg

SEQ ID NO: 2768 - DNA, 18 bp, Homo sapiens
actgcagagccgctgccg

SEQ ID NO: 2769 - DNA, 17 bp, Homo sapiens
actgcagttgtctacgc

SEQ ID NO: 2770 - DNA, 17 bp, Homo sapiens
actgcatccccgagacg

SEQ ID NO: 2771 - DNA, 18 bp, Homo sapiens
actgccactgccacctcg

SEQ ID NO: 2772 - DNA, 19 bp, Homo sapiens
actgccggagcggggcggt

SEQ ID NO: 2773 - DNA, 19 bp, Homo sapiens
actgccgtcgggtaaggtc

SEQ ID NO: 2774 - DNA, 17 bp, Homo sapiens
actgcgccgagggccgc

SEQ ID NO: 2775 - DNA, 19 bp, Homo sapiens
actgcgggcgtcgcggcag

SEQ ID NO: 2776 - DNA, 18 bp, Homo sapiens
actgctaggggcttaagc

SEQ ID NO: 2777 - DNA, 18 bp, Homo sapiens
actgctgagacgaggtta

SEQ ID NO: 2778 - DNA, 18 bp, Homo sapiens
actgctggtgtcagagcc

SEQ ID NO: 2779 - DNA, 20 bp, Homo sapiens
actgcttacactgaagaggg

SEQ ID NO: 2780 - DNA, 20 bp, Homo sapiens
actggaccgagcggagttgt

SEQ ID NO: 2781 - DNA, 18 bp, Homo sapiens
actggacgcagctggctg

SEQ ID NO: 2782 - DNA, 19 bp, Homo sapiens
actggacgttggcacagtg

SEQ ID NO: 2783 - DNA, 21 bp, Homo sapiens
actggagagaagcaggcctga

SEQ ID NO: 2784 - DNA, 17 bp, Homo sapiens
actggagcacggagctg

SEQ ID NO: 2785 - DNA, 16 bp, Homo sapiens
actggaggctggcgga

SEQ ID NO: 2786 - DNA, 17 bp, Homo sapiens
actggaggctggcggac

SEQ ID NO: 2787 - DNA, 19 bp, Homo sapiens
actggcggagcagctctag

SEQ ID NO: 2788 - DNA, 19 bp, Homo sapiens
gcacaagatggcggctctg

SEQ ID NO: 2789 - DNA, 18 bp, Homo sapiens
gcacaaggcacaacaggc

SEQ ID NO: 2790 - DNA, 20 bp, Homo sapiens
gcacacaccggctgggaggc

SEQ ID NO: 2791 - DNA, 18 bp, Homo sapiens
gcacaccctgagggtagc

SEQ ID NO: 2792 - DNA, 19 bp, Homo sapiens
gcacaccctgagggtagcg

SEQ ID NO: 2793 - DNA, 20 bp, Homo sapiens
gcacactagtcgtctggctc

SEQ ID NO: 2794 - DNA, 20 bp, Homo sapiens
gcacactggaaggagtcatg

SEQ ID NO: 2795 - DNA, 21 bp, Homo sapiens
gcacagaagaacttcgggagc

SEQ ID NO: 2796 - DNA, 17 bp, Homo sapiens
gcacagaagaaggacgg

SEQ ID NO: 2797 - DNA, 18 bp, Homo sapiens
gcacagacccggaagcgg

SEQ ID NO: 2798 - DNA, 21 bp, Homo sapiens
gcacagaggccggggagagcg

SEQ ID NO: 2799 - DNA, 18 bp, Homo sapiens
gcacagccagagcctaaa

SEQ ID NO: 2800 - DNA, 18 bp, Homo sapiens
gcacagggtcgcgcgggc

SEQ ID NO: 2801 - DNA, 17 bp, Homo sapiens
gcacagttcaagagcat

SEQ ID NO: 2802 - DNA, 19 bp, Homo sapiens
gcaccaagatcgttctggc

SEQ ID NO: 2803 - DNA, 17 bp, Homo sapiens
gcaccatcccagaagct

SEQ ID NO: 2804 - DNA, 20 bp, Homo sapiens
gcacccaacgtgggctggtg

SEQ ID NO: 2805 - DNA, 19 bp, Homo sapiens
gcacccccccgccagcctg

SEQ ID NO: 2806 - DNA, 18 bp, Homo sapiens
gcaccgagctcgcggcac

SEQ ID NO: 2807 - DNA, 22 bp, Homo sapiens
gcaccgcgcgggacggagcttg

SEQ ID NO: 2808 - DNA, 19 bp, Homo sapiens
gcaccgcggagcgggctgc

SEQ ID NO: 2809 - DNA, 18 bp, Homo sapiens
gcaccggggctgggcggg

SEQ ID NO: 2810 - DNA, 18 bp, Homo sapiens
gcaccggtgggagctagg

SEQ ID NO: 2811 - DNA, 18 bp, Homo sapiens
gcaccgttaagatggcgg

SEQ ID NO: 2812 - DNA, 18 bp, Homo sapiens
gcacctcattcatttcta

SEQ ID NO: 2813 - DNA, 20 bp, Homo sapiens
gcacctcattcatttctacc

SEQ ID NO: 2814 - DNA, 20 bp, Homo sapiens
gcacctcccagcatgccttg

SEQ ID NO: 2815 - DNA, 19 bp, Homo sapiens
gcacctcggcccgggtgag

SEQ ID NO: 2816 - DNA, 18 bp, Homo sapiens
gcacgagggaggaacgcg

SEQ ID NO: 2817 - DNA, 18 bp, Homo sapiens
gcacgagggctgggcggt

SEQ ID NO: 2818 - DNA, 19 bp, Homo sapiens
gcacgcccagcgagttcca

SEQ ID NO: 2819 - DNA, 18 bp, Homo sapiens
gcacgctggcctggggca

SEQ ID NO: 2820 - DNA, 21 bp, Homo sapiens
gcacgctggcctggggcacgg

SEQ ID NO: 2821 - DNA, 19 bp, Homo sapiens
gcacggagaggaggacggt

SEQ ID NO: 2822 - DNA, 19 bp, Homo sapiens
gcacggagctgcagccggt

SEQ ID NO: 2823 - DNA, 17 bp, Homo sapiens
gcacggcgggaaccggc

SEQ ID NO: 2824 - DNA, 18 bp, Homo sapiens
gcacgggctggaactggc

SEQ ID NO: 2825 - DNA, 18 bp, Homo sapiens
gcacggttggaggaggtc

SEQ ID NO: 2826 - DNA, 17 bp, Homo sapiens
gcacgtaggtggcgggg

SEQ ID NO: 2827 - DNA, 18 bp, Homo sapiens
gcacgttactccgtccga

SEQ ID NO: 2828 - DNA, 19 bp, Homo sapiens
gcacgttactccgtccgaa

SEQ ID NO: 2829 - DNA, 17 bp, Homo sapiens
gcactcgctcagcgacc

SEQ ID NO: 2830 - DNA, 18 bp, Homo sapiens
gcactcttattctgcgcc

SEQ ID NO: 2831 - DNA, 16 bp, Homo sapiens
gcactgaagatggcgg

SEQ ID NO: 2832 - DNA, 18 bp, Homo sapiens
gcactgaagatggcggct

SEQ ID NO: 2833 - DNA, 18 bp, Homo sapiens
gcactgctcttcccggtc

SEQ ID NO: 2834 - DNA, 18 bp, Homo sapiens
gcactgctgagagcaaga

SEQ ID NO: 2835 - DNA, 18 bp, Homo sapiens
gcactggccgcggacgct

SEQ ID NO: 2836 - DNA, 19 bp, Homo sapiens
gcactgggaagcgccatgg

SEQ ID NO: 2837 - DNA, 17 bp, Homo sapiens
gcactgtcggcggggta

SEQ ID NO: 2838 - DNA, 24 bp, Homo sapiens
gcactgtggacgatgagtcagggt

SEQ ID NO: 2839 - DNA, 18 bp, Homo sapiens
gcactgtgggaaagagct

SEQ ID NO: 2840 - DNA, 19 bp, Homo sapiens
gcacttccgggagcctggg

SEQ ID NO: 2841 - DNA, 19 bp, Homo sapiens
gcacttccgtttttgctgg

SEQ ID NO: 2842 - DNA, 18 bp, Homo sapiens
gcacttgcttcaagtcgc

SEQ ID NO: 2843 - DNA, 18 bp, Homo sapiens
gcacttgtctttctcctg

SEQ ID NO: 2844 - DNA, 18 bp, Homo sapiens
gcactttcaaaatggcgg

SEQ ID NO: 2845 - DNA, 19 bp, Homo sapiens
actggctagaagacagcag

SEQ ID NO: 2846 - DNA, 18 bp, Homo sapiens
actgggaaatgtcagccg

SEQ ID NO: 2847 - DNA, 18 bp, Homo sapiens
actgggaagcgccatggc

SEQ ID NO: 2848 - DNA, 18 bp, Homo sapiens
actgggaaggggacccac

SEQ ID NO: 2849 - DNA, 17 bp, Homo sapiens
actgggacggtggggtt

SEQ ID NO: 2850 - DNA, 18 bp, Homo sapiens
actgggacggtggggttc

SEQ ID NO: 2851 - DNA, 18 bp, Homo sapiens
actgggagccttagccgc

SEQ ID NO: 2852 - DNA, 18 bp, Homo sapiens
actgggagttggtgcctg

SEQ ID NO: 2853 - DNA, 23 bp, Homo sapiens
actgggagtttgaccgcgttgac

SEQ ID NO: 2854 - DNA, 17 bp, Homo sapiens
actgggcagaacgcgac

SEQ ID NO: 2855 - DNA, 18 bp, Homo sapiens
actgggctaaccgggagt

SEQ ID NO: 2856 - DNA, 17 bp, Homo sapiens
actgggtcttttgcggc

SEQ ID NO: 2857 - DNA, 19 bp, Homo sapiens
actgggtggccggtgggcc

SEQ ID NO: 2858 - DNA, 22 bp, Homo sapiens
actgggttcggagaacgacggc

SEQ ID NO: 2859 - DNA, 20 bp, Homo sapiens
actgggttgccaagctcgcg

SEQ ID NO: 2860 - DNA, 19 bp, Homo sapiens
actggtgagtcttcgctcc

SEQ ID NO: 2861 - DNA, 23 bp, Homo sapiens
actgtagatgcgatggcgccgat

SEQ ID NO: 2862 - DNA, 19 bp, Homo sapiens
actgtagccgccaccggca

SEQ ID NO: 2863 - DNA, 18 bp, Homo sapiens
actgtctgggcgggagga

SEQ ID NO: 2864 - DNA, 22 bp, Homo sapiens
actgtcttcgccttcttgcact

SEQ ID NO: 2865 - DNA, 18 bp, Homo sapiens
actgtgaagcgggccggg

SEQ ID NO: 2866 - DNA, 22 bp, Homo sapiens
actgtggaaacggtaatgctgt

SEQ ID NO: 2867 - DNA, 19 bp, Homo sapiens
actgttgtcatttccgggg

SEQ ID NO: 2868 - DNA, 20 bp, Homo sapiens
actgttgtggtgcggagcgt

SEQ ID NO: 2869 - DNA, 20 bp, Homo sapiens
actgttgtggttgagatgaa

SEQ ID NO: 2870 - DNA, 21 bp, Homo sapiens
acttaacggctaatgtggatc

SEQ ID NO: 2871 - DNA, 16 bp, Homo sapiens
acttacgggtggcggc

SEQ ID NO: 2872 - DNA, 19 bp, Homo sapiens
acttcacgtgacgccggtg

SEQ ID NO: 2873 - DNA, 19 bp, Homo sapiens
acttcattcttcaggtacc

SEQ ID NO: 2874 - DNA, 17 bp, Homo sapiens
acttccatgcgaccgcc

SEQ ID NO: 2875 - DNA, 16 bp, Homo sapiens
acttcccagacgccga

SEQ ID NO: 2876 - DNA, 16 bp, Homo sapiens
acttccgcttccttcc

SEQ ID NO: 2877 - DNA, 18 bp, Homo sapiens
acttccgcttccttccag

SEQ ID NO: 2878 - DNA, 18 bp, Homo sapiens
acttccgcttgacctggc

SEQ ID NO: 2879 - DNA, 17 bp, Homo sapiens
acttccggccggaccgc

SEQ ID NO: 2880 - DNA, 18 bp, Homo sapiens
acttccggcgaggaagtg

SEQ ID NO: 2881 - DNA, 21 bp, Homo sapiens
acttccggttgcgacggaggt

SEQ ID NO: 2882 - DNA, 20 bp, Homo sapiens
acttccgtttttgctgggta

SEQ ID NO: 2883 - DNA, 18 bp, Homo sapiens
acttcctccagagactga

SEQ ID NO: 2884 - DNA, 18 bp, Homo sapiens
acttcctgtactttttag

SEQ ID NO: 2885 - DNA, 18 bp, Homo sapiens
acttcgccccgcccggcg

SEQ ID NO: 2886 - DNA, 23 bp, Homo sapiens
acttcgccgagcgctctcactcg

SEQ ID NO: 2887 - DNA, 24 bp, Homo sapiens
acttcggtcctgagcgcttgggag

SEQ ID NO: 2888 - DNA, 21 bp, Homo sapiens
acttctcacttccgcttcctt

SEQ ID NO: 2889 - DNA, 20 bp, Homo sapiens
acttctttccccttctctgt

SEQ ID NO: 2890 - DNA, 17 bp, Homo sapiens
acttcttttcttggcta

SEQ ID NO: 2891 - DNA, 18 bp, Homo sapiens
acttcttttcttggctaa

SEQ ID NO: 2892 - DNA, 18 bp, Homo sapiens
acttgacggcgcgaaact

SEQ ID NO: 2893 - DNA, 19 bp, Homo sapiens
acttgctagaaggaacgag

SEQ ID NO: 2894 - DNA, 17 bp, Homo sapiens
acttggacgctgcagag

SEQ ID NO: 2895 - DNA, 16 bp, Homo sapiens
acttgggaaggtaact

SEQ ID NO: 2896 - DNA, 19 bp, Homo sapiens
acttggggtcttttcccaa

SEQ ID NO: 2897 - DNA, 18 bp, Homo sapiens
acttgtctttctcctgcc

SEQ ID NO: 2898 - DNA, 19 bp, Homo sapiens
actttcaaaatggcggagt

SEQ ID NO: 2899 - DNA, 21 bp, Homo sapiens
actttggaatcccatcttgag

SEQ ID NO: 2900 - DNA, 18 bp, Homo sapiens
actttgtaacttttaagt

SEQ ID NO: 2901 - DNA, 18 bp, Homo sapiens
actttgtgctgctgccgc

SEQ ID NO: 2902 - DNA, 19 bp, Homo sapiens
gcacttttctgagcagacg

SEQ ID NO: 2903 - DNA, 20 bp, Homo sapiens
gcacttttctgagcagacgt

SEQ ID NO: 2904 - DNA, 18 bp, Homo sapiens
gcagaacccatcaggaag

SEQ ID NO: 2905 - DNA, 18 bp, Homo sapiens
gcagaacttggggagccg

SEQ ID NO: 2906 - DNA, 19 bp, Homo sapiens
gcagaacttggggagccgc

SEQ ID NO: 2907 - DNA, 20 bp, Homo sapiens
gcagaaggaacaaagcaccc

SEQ ID NO: 2908 - DNA, 18 bp, Homo sapiens
gcagaagtgagctgagcg

SEQ ID NO: 2909 - DNA, 20 bp, Homo sapiens
gcagaagtgagctgagcgtg

SEQ ID NO: 2910 - DNA, 17 bp, Homo sapiens
gcagacccgcgacccgg

SEQ ID NO: 2911 - DNA, 22 bp, Homo sapiens
gcagaccgggcggaaagcagcc

SEQ ID NO: 2912 - DNA, 22 bp, Homo sapiens
gcagacgctcgggggaacatgg

SEQ ID NO: 2913 - DNA, 19 bp, Homo sapiens
gcagacggagcgcgctgag

SEQ ID NO: 2914 - DNA, 19 bp, Homo sapiens
gcagacgggagtagggagg

SEQ ID NO: 2915 - DNA, 16 bp, Homo sapiens
gcagacgtccagagca

SEQ ID NO: 2916 - DNA, 19 bp, Homo sapiens
gcagacgtccagagcagag

SEQ ID NO: 2917 - DNA, 18 bp, Homo sapiens
gcagactgtactggcctg

SEQ ID NO: 2918 - DNA, 18 bp, Homo sapiens
gcagagacgtagaaggcg

SEQ ID NO: 2919 - DNA, 17 bp, Homo sapiens
gcagagagagatgggcg

SEQ ID NO: 2920 - DNA, 18 bp, Homo sapiens
gcagagagagatgggcgt

SEQ ID NO: 2921 - DNA, 19 bp, Homo sapiens
gcagagagagtcgggttac

SEQ ID NO: 2922 - DNA, 21 bp, Homo sapiens
gcagagagcggacctggcggc

SEQ ID NO: 2923 - DNA, 16 bp, Homo sapiens
gcagagaggcggaatg

SEQ ID NO: 2924 - DNA, 18 bp, Homo sapiens
gcagagcaggttcaaaca

SEQ ID NO: 2925 - DNA, 18 bp, Homo sapiens
gcagagctgcggaagatg

SEQ ID NO: 2926 - DNA, 17 bp, Homo sapiens
gcagagctgtccggctg

SEQ ID NO: 2927 - DNA, 18 bp, Homo sapiens
gcagaggaagatggcgcc

SEQ ID NO: 2928 - DNA, 18 bp, Homo sapiens
gcagaggaccaggaagtt

SEQ ID NO: 2929 - DNA, 18 bp, Homo sapiens
gcagaggaggcgggtttg

SEQ ID NO: 2930 - DNA, 18 bp, Homo sapiens
gcagaggaggctagcgtt

SEQ ID NO: 2931 - DNA, 18 bp, Homo sapiens
gcagaggccgggctgaga

SEQ ID NO: 2932 - DNA, 18 bp, Homo sapiens
gcagagggagcgggagcg

SEQ ID NO: 2933 - DNA, 21 bp, Homo sapiens
gcagagggcagtaagatataa

SEQ ID NO: 2934 - DNA, 18 bp, Homo sapiens
gcagaggtgcttgtgttt

SEQ ID NO: 2935 - DNA, 20 bp, Homo sapiens
gcagagtcagctgtgccggg

SEQ ID NO: 2936 - DNA, 17 bp, Homo sapiens
gcagagtggatcaggga

SEQ ID NO: 2937 - DNA, 17 bp, Homo sapiens
gcagatcgaaaagggag

SEQ ID NO: 2938 - DNA, 20 bp, Homo sapiens
gcagatgaactgaccttatg

SEQ ID NO: 2939 - DNA, 20 bp, Homo sapiens
gcagatgaggtagtagagtt

SEQ ID NO: 2940 - DNA, 18 bp, Homo sapiens
gcagattgccagcccttt

SEQ ID NO: 2941 - DNA, 21 bp, Homo sapiens
gcagcaagcgcggaactgggg

SEQ ID NO: 2942 - DNA, 20 bp, Homo sapiens
gcagcaccggagagggcgca

SEQ ID NO: 2943 - DNA, 19 bp, Homo sapiens
gcagcacggccgcaggacc

SEQ ID NO: 2944 - DNA, 20 bp, Homo sapiens
gcagcagatgtgtgacctgg

SEQ ID NO: 2945 - DNA, 17 bp, Homo sapiens
gcagcagcagtggtgga

SEQ ID NO: 2946 - DNA, 18 bp, Homo sapiens
gcagcagcccgcagcctc

SEQ ID NO: 2947 - DNA, 17 bp, Homo sapiens
gcagcagcggtcccatc

SEQ ID NO: 2948 - DNA, 18 bp, Homo sapiens
gcagcagcgttggcccgg

SEQ ID NO: 2949 - DNA, 19 bp, Homo sapiens
gcagcagctggaacgggag

SEQ ID NO: 2950 - DNA, 15 bp, Homo sapiens
gcagcaggcggggca

SEQ ID NO: 2951 - DNA, 17 bp, Homo sapiens
gcagcagtaggagtgtg

SEQ ID NO: 2952 - DNA, 18 bp, Homo sapiens
gcagcagtggtggaacga

SEQ ID NO: 2953 - DNA, 20 bp, Homo sapiens
gcagcatcttccctgacggt

SEQ ID NO: 2954 - DNA, 18 bp, Homo sapiens
gcagcatgagccggaccc

SEQ ID NO: 2955 - DNA, 19 bp, Homo sapiens
gcagcattcggcagagggc

SEQ ID NO: 2956 - DNA, 19 bp, Homo sapiens
gcagccacagccggactgg

SEQ ID NO: 2957 - DNA, 18 bp, Homo sapiens
gcagccaccgccatgtcg

SEQ ID NO: 2958 - DNA, 18 bp, Homo sapiens
gcagccactcagcccttc

SEQ ID NO: 2959 - DNA, 19 bp, Homo sapiens
acttttattaggtcgtctt

SEQ ID NO: 2960 - DNA, 18 bp, Homo sapiens
acttttcttttctccagg

SEQ ID NO: 2961 - DNA, 19 bp, Homo sapiens
actttttccaaaggctgga

SEQ ID NO: 2962 - DNA, 14 bp, Homo sapiens
actttttggacgat

SEQ ID NO: 2963 - DNA, 17 bp, Homo sapiens
agaaaaaccagcaagaa

SEQ ID NO: 2964 - DNA, 21 bp, Homo sapiens
agaaaagcgcttcagtagcga

SEQ ID NO: 2965 - DNA, 20 bp, Homo sapiens
agaaaaggcggcggcccggc

SEQ ID NO: 2966 - DNA, 21 bp, Homo sapiens
agaaaagtaacttcgcttttc

SEQ ID NO: 2967 - DNA, 24 bp, Homo sapiens
agaaacgactcagggactgcggcg

SEQ ID NO: 2968 - DNA, 16 bp, Homo sapiens
agaaacgggccgcgaa

SEQ ID NO: 2969 - DNA, 21 bp, Homo sapiens
agaaacggttctgcaggatgg

SEQ ID NO: 2970 - DNA, 19 bp, Homo sapiens
agaaactacggcgactgta

SEQ ID NO: 2971 - DNA, 22 bp, Homo sapiens
agaaactgctgagacgaggtta

SEQ ID NO: 2972 - DNA, 20 bp, Homo sapiens
agaaactggggacatggcag

SEQ ID NO: 2973 - DNA, 18 bp, Homo sapiens
agaaagagaggagccgac

SEQ ID NO: 2974 - DNA, 16 bp, Homo sapiens
agaaagatggcctccg

SEQ ID NO: 2975 - DNA, 18 bp, Homo sapiens
agaaagcagcagttaaag

SEQ ID NO: 2976 - DNA, 19 bp, Homo sapiens
agaaaggttataaaccctg

SEQ ID NO: 2977 - DNA, 18 bp, Homo sapiens
agaacacagctgtgcgcg

SEQ ID NO: 2978 - DNA, 18 bp, Homo sapiens
agaacctttgcacgcgca

SEQ ID NO: 2979 - DNA, 16 bp, Homo sapiens
agaacgcgccagaggt

SEQ ID NO: 2980 - DNA, 17 bp, Homo sapiens
agaacgctgaggtcggt

SEQ ID NO: 2981 - DNA, 16 bp, Homo sapiens
agaacggagcggacgc

SEQ ID NO: 2982 - DNA, 18 bp, Homo sapiens
agaactctaactccccca

SEQ ID NO: 2983 - DNA, 18 bp, Homo sapiens
agaactgggaggaggagt

SEQ ID NO: 2984 - DNA, 22 bp, Homo sapiens
agaactgtactctccgagaggt

SEQ ID NO: 2985 - DNA, 18 bp, Homo sapiens
agaactgtcgggagcttc

SEQ ID NO: 2986 - DNA, 19 bp, Homo sapiens
agaacttcttatgtgcggc

SEQ ID NO: 2987 - DNA, 17 bp, Homo sapiens
agaacttggggagccgc

SEQ ID NO: 2988 - DNA, 20 bp, Homo sapiens
agaagaaagtgtcagagccg

SEQ ID NO: 2989 - DNA, 18 bp, Homo sapiens
agaagaagatcggtagat

SEQ ID NO: 2990 - DNA, 22 bp, Homo sapiens
agaagaaggatggaaagaagcg

SEQ ID NO: 2991 - DNA, 18 bp, Homo sapiens
agaagagaagtctgagat

SEQ ID NO: 2992 - DNA, 19 bp, Homo sapiens
agaagagagaggcaagggc

SEQ ID NO: 2993 - DNA, 19 bp, Homo sapiens
agaagagcggggtcggggc

SEQ ID NO: 2994 - DNA, 19 bp, Homo sapiens
agaagatcgaggacacgct

SEQ ID NO: 2995 - DNA, 18 bp, Homo sapiens
agaagatggcggaagcgg

SEQ ID NO: 2996 - DNA, 16 bp, Homo sapiens
agaagatttgttgccg

SEQ ID NO: 2997 - DNA, 18 bp, Homo sapiens
agaagcaggtccgaggca

SEQ ID NO: 2998 - DNA, 20 bp, Homo sapiens
agaagccaagactgagccgg

SEQ ID NO: 2999 - DNA, 18 bp, Homo sapiens
agaagccaggacggcccg

SEQ ID NO: 3000 - DNA, 18 bp, Homo sapiens
agaagccatctgaatact

SEQ ID NO: 3001 - DNA, 19 bp, Homo sapiens
agaagcgcgcttagtctgc

SEQ ID NO: 3002 - DNA, 19 bp, Homo sapiens
agaagcgctgcgggaagca

SEQ ID NO: 3003 - DNA, 20 bp, Homo sapiens
agaagcgctgcgggaagcag

SEQ ID NO: 3004 - DNA, 20 bp, Homo sapiens
agaagcgggcgaattgggca

SEQ ID NO: 3005 - DNA, 20 bp, Homo sapiens
agaagctgcccttggctgct

SEQ ID NO: 3006 - DNA, 20 bp, Homo sapiens
agaagctgtaactgcaattt

SEQ ID NO: 3007 - DNA, 18 bp, Homo sapiens
agaaggactatgggggaa

SEQ ID NO: 3008 - DNA, 18 bp, Homo sapiens
agaaggagacctgcttcc

SEQ ID NO: 3009 - DNA, 18 bp, Homo sapiens
agaaggcaggggaggtgg

SEQ ID NO: 3010 - DNA, 18 bp, Homo sapiens
agaagggtgatacggaga

SEQ ID NO: 3011 - DNA, 19 bp, Homo sapiens
agaagtaggaacgagaagc

SEQ ID NO: 3012 - DNA, 18 bp, Homo sapiens
agaagtgaaccaggaagt

SEQ ID NO: 3013 - DNA, 18 bp, Homo sapiens
agaagttgcttagtcatg

SEQ ID NO: 3014 - DNA, 22 bp, Homo sapiens
agaagttggcgtgcagctggga

SEQ ID NO: 3015 - DNA, 17 bp, Homo sapiens
agaatccgtgaacatgg

SEQ ID NO: 3016 - DNA, 16 bp, Homo sapiens
gcagccaggctgtgtc

SEQ ID NO: 3017 - DNA, 20 bp, Homo sapiens
gcagccatcttgtttgtttg

SEQ ID NO: 3018 - DNA, 18 bp, Homo sapiens
gcagccatgaggtgaggg

SEQ ID NO: 3019 - DNA, 22 bp, Homo sapiens
gcagccattgaaggggaaggaa

SEQ ID NO: 3020 - DNA, 20 bp, Homo sapiens
gcagcccggagtcggccttg

SEQ ID NO: 3021 - DNA, 23 bp, Homo sapiens
gcagcccgtgccgccgccgcctc

SEQ ID NO: 3022 - DNA, 20 bp, Homo sapiens
gcagccgaacggagtcgggg

SEQ ID NO: 3023 - DNA, 21 bp, Homo sapiens
gcagccgaagagtgtggtagg

SEQ ID NO: 3024 - DNA, 22 bp, Homo sapiens
gcagccgaaggccaaggaatca

SEQ ID NO: 3025 - DNA, 18 bp, Homo sapiens
gcagccgagggggtcccc

SEQ ID NO: 3026 - DNA, 16 bp, Homo sapiens
gcagccgccaccacgc

SEQ ID NO: 3027 - DNA, 21 bp, Homo sapiens
gcagccgccggggcgcaatgc

SEQ ID NO: 3028 - DNA, 20 bp, Homo sapiens
gcagccgcctgccgaactga

SEQ ID NO: 3029 - DNA, 24 bp, Homo sapiens
gcagccgcgcccgcggagttttcc

SEQ ID NO: 3030 - DNA, 20 bp, Homo sapiens
gcagccgcggccggcaggac

SEQ ID NO: 3031 - DNA, 21 bp, Homo sapiens
gcagccggagatggcggcggt

SEQ ID NO: 3032 - DNA, 21 bp, Homo sapiens
gcagccggagcgcacccggcc

SEQ ID NO: 3033 - DNA, 18 bp, Homo sapiens
gcagccgggacttcagtt

SEQ ID NO: 3034 - DNA, 18 bp, Homo sapiens
gcagccgggcgccgcggg

SEQ ID NO: 3035 - DNA, 17 bp, Homo sapiens
gcagccgggcgtccccg

SEQ ID NO: 3036 - DNA, 22 bp, Homo sapiens
gcagccgggcttcgctcgccgc

SEQ ID NO: 3037 - DNA, 16 bp, Homo sapiens
gcagccgtcatggcag

SEQ ID NO: 3038 - DNA, 20 bp, Homo sapiens
gcagcctgagctctaggtct

SEQ ID NO: 3039 - DNA, 18 bp, Homo sapiens
gcagcctggacgggagca

SEQ ID NO: 3040 - DNA, 18 bp, Homo sapiens
gcagcgagcagggtggtg

SEQ ID NO: 3041 - DNA, 18 bp, Homo sapiens
gcagcgatggcggagagt

SEQ ID NO: 3042 - DNA, 20 bp, Homo sapiens
gcagcgcggcctgggctccc

SEQ ID NO: 3043 - DNA, 17 bp, Homo sapiens
gcagcgcgggcctccgc

SEQ ID NO: 3044 - DNA, 18 bp, Homo sapiens
gcagcgcggtcagtggcg

SEQ ID NO: 3045 - DNA, 16 bp, Homo sapiens
gcagcgctctcggttg

SEQ ID NO: 3046 - DNA, 18 bp, Homo sapiens
gcagcgctggaggaagaa

SEQ ID NO: 3047 - DNA, 18 bp, Homo sapiens
gcagcggacgccggtctc

SEQ ID NO: 3048 - DNA, 18 bp, Homo sapiens
gcagcggactaataaagg

SEQ ID NO: 3049 - DNA, 16 bp, Homo sapiens
gcagcggagacagagg

SEQ ID NO: 3050 - DNA, 19 bp, Homo sapiens
gcagcggagcctggagaga

SEQ ID NO: 3051 - DNA, 20 bp, Homo sapiens
gcagcggcagcagaggcagc

SEQ ID NO: 3052 - DNA, 16 bp, Homo sapiens
gcagcggcggaaagtt

SEQ ID NO: 3053 - DNA, 18 bp, Homo sapiens
gcagcggcggaaagtttg

SEQ ID NO: 3054 - DNA, 18 bp, Homo sapiens
gcagcggcggcctgagct

SEQ ID NO: 3055 - DNA, 19 bp, Homo sapiens
gcagcggcggcctgagctt

SEQ ID NO: 3056 - DNA, 18 bp, Homo sapiens
gcagcggctctagcggca

SEQ ID NO: 3057 - DNA, 18 bp, Homo sapiens
gcagcgggaagaaaagtc

SEQ ID NO: 3058 - DNA, 18 bp, Homo sapiens
gcagcgggagcggtggcg

SEQ ID NO: 3059 - DNA, 17 bp, Homo sapiens
gcagcgggatcgggatg

SEQ ID NO: 3060 - DNA, 19 bp, Homo sapiens
gcagcgggatggaggtgga

SEQ ID NO: 3061 - DNA, 21 bp, Homo sapiens
gcagcgggcagcggcccgcgg

SEQ ID NO: 3062 - DNA, 19 bp, Homo sapiens
gcagcggggcactgggctg

SEQ ID NO: 3063 - DNA, 17 bp, Homo sapiens
gcagcggggtaggatgg

SEQ ID NO: 3064 - DNA, 18 bp, Homo sapiens
gcagcggggtaggtgttg

SEQ ID NO: 3065 - DNA, 17 bp, Homo sapiens
gcagcgggtcctctcta

SEQ ID NO: 3066 - DNA, 18 bp, Homo sapiens
gcagcggtaagagcgggg

SEQ ID NO: 3067 - DNA, 18 bp, Homo sapiens
gcagcggtgttgcacctc

SEQ ID NO: 3068 - DNA, 19 bp, Homo sapiens
gcagcgtctggggtttccg

SEQ ID NO: 3069 - DNA, 18 bp, Homo sapiens
gcagctactgcaaggcaa

SEQ ID NO: 3070 - DNA, 23 bp, Homo sapiens
gcagctccgaccaccggaaatta

SEQ ID NO: 3071 - DNA, 18 bp, Homo sapiens
gcagctccgggtgcagga

SEQ ID NO: 3072 - DNA, 19 bp, Homo sapiens
gcagctcgccggaggccgg

SEQ ID NO: 3073 - DNA, 18 bp, Homo sapiens
agacaagagagatctaag

SEQ ID NO: 3074 - DNA, 18 bp, Homo sapiens
agacacaacaaagatggc

SEQ ID NO: 3075 - DNA, 19 bp, Homo sapiens
agacaccggaaggagccgc

SEQ ID NO: 3076 - DNA, 19 bp, Homo sapiens
agacacgaagcctcccggg

SEQ ID NO: 3077 - DNA, 18 bp, Homo sapiens
agacacgccttagcgcca

SEQ ID NO: 3078 - DNA, 20 bp, Homo sapiens
agacacggacagcgacgaag

SEQ ID NO: 3079 - DNA, 19 bp, Homo sapiens
agacactgaggcagggtag

SEQ ID NO: 3080 - DNA, 19 bp, Homo sapiens
agacagacgggagggggac

SEQ ID NO: 3081 - DNA, 23 bp, Homo sapiens
agacagcgccgggaagatgagca

SEQ ID NO: 3082 - DNA, 18 bp, Homo sapiens
agacagctggggagagac

SEQ ID NO: 3083 - DNA, 18 bp, Homo sapiens
agacagggtggagtaggg

SEQ ID NO: 3084 - DNA, 19 bp, Homo sapiens
agacagtgcaggacgagaa

SEQ ID NO: 3085 - DNA, 18 bp, Homo sapiens
agacatttcctgctcgga

SEQ ID NO: 3086 - DNA, 18 bp, Homo sapiens
agaccacgggccgaggcc

SEQ ID NO: 3087 - DNA, 18 bp, Homo sapiens
agaccacgggttgcagcc

SEQ ID NO: 3088 - DNA, 16 bp, Homo sapiens
agaccactgagacgag

SEQ ID NO: 3089 - DNA, 19 bp, Homo sapiens
agaccactgcagaccacgg

SEQ ID NO: 3090 - DNA, 20 bp, Homo sapiens
agaccaggtatgtgcgctgg

SEQ ID NO: 3091 - DNA, 19 bp, Homo sapiens
agacccaggctgcgggacg

SEQ ID NO: 3092 - DNA, 19 bp, Homo sapiens
agacccatggcaaggaaac

SEQ ID NO: 3093 - DNA, 23 bp, Homo sapiens
agacccggcactgagggcaacgg

SEQ ID NO: 3094 - DNA, 18 bp, Homo sapiens
agaccctgcggcagagac

SEQ ID NO: 3095 - DNA, 16 bp, Homo sapiens
agaccgcggcggagcc

SEQ ID NO: 3096 - DNA, 18 bp, Homo sapiens
agaccgcggggtagtcgg

SEQ ID NO: 3097 - DNA, 19 bp, Homo sapiens
agaccgggaagcaccgtga

SEQ ID NO: 3098 - DNA, 20 bp, Homo sapiens
agacctgacgtagatccgaa

SEQ ID NO: 3099 - DNA, 17 bp, Homo sapiens
agacgaagacggaaccg

SEQ ID NO: 3100 - DNA, 18 bp, Homo sapiens
agacgaagacggaaccgg

SEQ ID NO: 3101 - DNA, 18 bp, Homo sapiens
agacgagttaagtcctgg

SEQ ID NO: 3102 - DNA, 16 bp, Homo sapiens
agacgccgccggccgc

SEQ ID NO: 3103 - DNA, 19 bp, Homo sapiens
agacgccgtggcagcctga

SEQ ID NO: 3104 - DNA, 17 bp, Homo sapiens
agacgcgcgctatgacg

SEQ ID NO: 3105 - DNA, 18 bp, Homo sapiens
agacgcgtacaacccgga

SEQ ID NO: 3106 - DNA, 19 bp, Homo sapiens
agacgctgcgtggagcggc

SEQ ID NO: 3107 - DNA, 19 bp, Homo sapiens
agacgcttcctgggtttga

SEQ ID NO: 3108 - DNA, 17 bp, Homo sapiens
agacggagctggagcgg

SEQ ID NO: 3109 - DNA, 18 bp, Homo sapiens
agacggaggaggctgctg

SEQ ID NO: 3110 - DNA, 18 bp, Homo sapiens
agacggcagcgggagcgg

SEQ ID NO: 3111 - DNA, 19 bp, Homo sapiens
agacggcgctccccgactc

SEQ ID NO: 3112 - DNA, 18 bp, Homo sapiens
agacggcggtcgggtagg

SEQ ID NO: 3113 - DNA, 18 bp, Homo sapiens
agacggggcgcggggacc

SEQ ID NO: 3114 - DNA, 16 bp, Homo sapiens
agacggtctagcgctg

SEQ ID NO: 3115 - DNA, 18 bp, Homo sapiens
agacgtcggaggagccgg

SEQ ID NO: 3116 - DNA, 17 bp, Homo sapiens
agacgttgttgagtccc

SEQ ID NO: 3117 - DNA, 19 bp, Homo sapiens
agactaatgggacggaggg

SEQ ID NO: 3118 - DNA, 22 bp, Homo sapiens
agactatctttctagacaaggc

SEQ ID NO: 3119 - DNA, 16 bp, Homo sapiens
agactcagagctacgg

SEQ ID NO: 3120 - DNA, 17 bp, Homo sapiens
agactcagagctacggc

SEQ ID NO: 3121 - DNA, 19 bp, Homo sapiens
agactcagagctacggcca

SEQ ID NO: 3122 - DNA, 17 bp, Homo sapiens
agactcccttttctttg

SEQ ID NO: 3123 - DNA, 19 bp, Homo sapiens
agactcccttttctttggc

SEQ ID NO: 3124 - DNA, 18 bp, Homo sapiens
agactgacgagtgcggtg

SEQ ID NO: 3125 - DNA, 20 bp, Homo sapiens
agactgacgagtgcggtgtc

SEQ ID NO: 3126 - DNA, 19 bp, Homo sapiens
agactgaggctagttacca

SEQ ID NO: 3127 - DNA, 18 bp, Homo sapiens
agactgcgggacggacgg

SEQ ID NO: 3128 - DNA, 21 bp, Homo sapiens
agactgcggggcgggccatgg

SEQ ID NO: 3129 - DNA, 18 bp, Homo sapiens
agactggtagtgaggctt

SEQ ID NO: 3130 - DNA, 19 bp, Homo sapiens
gcagctcttgggttttttg

SEQ ID NO: 3131 - DNA, 18 bp, Homo sapiens
gcagctgaaggctcggtt

SEQ ID NO: 3132 - DNA, 18 bp, Homo sapiens
gcagctgagagcgagagg

SEQ ID NO: 3133 - DNA, 22 bp, Homo sapiens
gcagctgccgaagtcagttcct

SEQ ID NO: 3134 - DNA, 17 bp, Homo sapiens
gcagctgcctgaaccga

SEQ ID NO: 3135 - DNA, 18 bp, Homo sapiens
gcagctggaacgggagta

SEQ ID NO: 3136 - DNA, 18 bp, Homo sapiens
gcagctggggctgcgggc

SEQ ID NO: 3137 - DNA, 18 bp, Homo sapiens
gcagctgtacagggcggg

SEQ ID NO: 3138 - DNA, 19 bp, Homo sapiens
gcagctgtggccggagagg

SEQ ID NO: 3139 - DNA, 21 bp, Homo sapiens
gcagctgtggctaaggagggg

SEQ ID NO: 3140 - DNA, 21 bp, Homo sapiens
gcagcttctcttgtctctgac

SEQ ID NO: 3141 - DNA, 18 bp, Homo sapiens
gcagcttggtagggattg

SEQ ID NO: 3142 - DNA, 17 bp, Homo sapiens
gcaggaaagcgtgcgtg

SEQ ID NO: 3143 - DNA, 18 bp, Homo sapiens
gcaggaaagcgtgcgtgc

SEQ ID NO: 3144 - DNA, 18 bp, Homo sapiens
gcaggaacgagagcggag

SEQ ID NO: 3145 - DNA, 16 bp, Homo sapiens
gcaggaagcgcgggct

SEQ ID NO: 3146 - DNA, 19 bp, Homo sapiens
gcaggaagcgcgggctcgg

SEQ ID NO: 3147 - DNA, 16 bp, Homo sapiens
gcaggacacattgatc

SEQ ID NO: 3148 - DNA, 18 bp, Homo sapiens
gcaggacacggaggaccg

SEQ ID NO: 3149 - DNA, 18 bp, Homo sapiens
gcaggacccggatgagag

SEQ ID NO: 3150 - DNA, 17 bp, Homo sapiens
gcaggacgaagctcgcg

SEQ ID NO: 3151 - DNA, 17 bp, Homo sapiens
gcaggacgaattcaccg

SEQ ID NO: 3152 - DNA, 18 bp, Homo sapiens
gcaggacggcggcaggta

SEQ ID NO: 3153 - DNA, 18 bp, Homo sapiens
gcaggagaagcggagctc

SEQ ID NO: 3154 - DNA, 19 bp, Homo sapiens
gcaggagaagcggagctct

SEQ ID NO: 3155 - DNA, 19 bp, Homo sapiens
gcaggagacacaagaagcg

SEQ ID NO: 3156 - DNA, 17 bp, Homo sapiens
gcaggagacactgtggt

SEQ ID NO: 3157 - DNA, 18 bp, Homo sapiens
gcaggagacactgtggtc

SEQ ID NO: 3158 - DNA, 20 bp, Homo sapiens
gcaggagacgcgaaccaaca

SEQ ID NO: 3159 - DNA, 18 bp, Homo sapiens
gcaggagacgcgtagccg

SEQ ID NO: 3160 - DNA, 16 bp, Homo sapiens
gcaggagccggaactg

SEQ ID NO: 3161 - DNA, 19 bp, Homo sapiens
gcaggagcgcggaacatgg

SEQ ID NO: 3162 - DNA, 18 bp, Homo sapiens
gcaggagcgggccaggag

SEQ ID NO: 3163 - DNA, 18 bp, Homo sapiens
gcaggagcgtagagagcg

SEQ ID NO: 3164 - DNA, 17 bp, Homo sapiens
gcaggagctgtagctac

SEQ ID NO: 3165 - DNA, 20 bp, Homo sapiens
gcaggaggacggagccctaa

SEQ ID NO: 3166 - DNA, 16 bp, Homo sapiens
gcaggaggagctctcg

SEQ ID NO: 3167 - DNA, 18 bp, Homo sapiens
gcaggaggaggacgggga

SEQ ID NO: 3168 - DNA, 21 bp, Homo sapiens
gcaggagggagccacggccag

SEQ ID NO: 3169 - DNA, 22 bp, Homo sapiens
gcaggaggtgagggagactggg

SEQ ID NO: 3170 - DNA, 18 bp, Homo sapiens
gcaggatggcggcggcgg

SEQ ID NO: 3171 - DNA, 18 bp, Homo sapiens
gcaggcacaggaagccgc

SEQ ID NO: 3172 - DNA, 18 bp, Homo sapiens
gcaggcagcgctgggtcc

SEQ ID NO: 3173 - DNA, 16 bp, Homo sapiens
gcaggccgggaacacg

SEQ ID NO: 3174 - DNA, 17 bp, Homo sapiens
gcaggccgggaacacga

SEQ ID NO: 3175 - DNA, 18 bp, Homo sapiens
gcaggccgggaacacgag

SEQ ID NO: 3176 - DNA, 19 bp, Homo sapiens
gcaggcgacggtggggaag

SEQ ID NO: 3177 - DNA, 16 bp, Homo sapiens
gcaggcgagccggacg

SEQ ID NO: 3178 - DNA, 19 bp, Homo sapiens
gcaggcgcagcgctccgat

SEQ ID NO: 3179 - DNA, 19 bp, Homo sapiens
gcaggcgcagcggcgacgg

SEQ ID NO: 3180 - DNA, 18 bp, Homo sapiens
gcaggcgccactcacggg

SEQ ID NO: 3181 - DNA, 18 bp, Homo sapiens
gcaggcgcggccgttctg

SEQ ID NO: 3182 - DNA, 20 bp, Homo sapiens
gcaggcggagtaaagggact

SEQ ID NO: 3183 - DNA, 18 bp, Homo sapiens
gcaggcggcgaagatggc

SEQ ID NO: 3184 - DNA, 18 bp, Homo sapiens
gcaggctgactgaccacc

SEQ ID NO: 3185 - DNA, 18 bp, Homo sapiens
gcaggctgcggatccccg

SEQ ID NO: 3186 - DNA, 20 bp, Homo sapiens
gcaggctgcggcgctgacgg

SEQ ID NO: 3187 - DNA, 19 bp, Homo sapiens
agactgtcagataaatcgg

SEQ ID NO: 3188 - DNA, 18 bp, Homo sapiens
agactgtggacgggagga

SEQ ID NO: 3189 - DNA, 18 bp, Homo sapiens
agactgttgggtaggctg

SEQ ID NO: 3190 - DNA, 18 bp, Homo sapiens
agagaaaaaaccccgagc

SEQ ID NO: 3191 - DNA, 18 bp, Homo sapiens
agagaaaagactgcgagg

SEQ ID NO: 3192 - DNA, 19 bp, Homo sapiens
agagaaaaggggccaccgg

SEQ ID NO: 3193 - DNA, 18 bp, Homo sapiens
agagaaagcgcgtactac

SEQ ID NO: 3194 - DNA, 18 bp, Homo sapiens
agagaacctttaccttgg

SEQ ID NO: 3195 - DNA, 18 bp, Homo sapiens
agagaacggagcggacgc

SEQ ID NO: 3196 - DNA, 20 bp, Homo sapiens
agagaagaacggaggtacgg

SEQ ID NO: 3197 - DNA, 19 bp, Homo sapiens
agagaaggaaggcggcggg

SEQ ID NO: 3198 - DNA, 18 bp, Homo sapiens
agagaaggcgctgggctg

SEQ ID NO: 3199 - DNA, 16 bp, Homo sapiens
agagaagggaaacaca

SEQ ID NO: 3200 - DNA, 18 bp, Homo sapiens
agagacagaaagaaacgc

SEQ ID NO: 3201 - DNA, 18 bp, Homo sapiens
agagacagaaggaaccgg

SEQ ID NO: 3202 - DNA, 20 bp, Homo sapiens
agagacagacaggatggact

SEQ ID NO: 3203 - DNA, 22 bp, Homo sapiens
agagacagagacaaaggcacag

SEQ ID NO: 3204 - DNA, 18 bp, Homo sapiens
agagacgagcgcttccgg

SEQ ID NO: 3205 - DNA, 18 bp, Homo sapiens
agagacgaggagaggaac

SEQ ID NO: 3206 - DNA, 18 bp, Homo sapiens
agagacgctgcaaattgc

SEQ ID NO: 3207 - DNA, 16 bp, Homo sapiens
agagacggcgctcagt

SEQ ID NO: 3208 - DNA, 18 bp, Homo sapiens
agagacgtagaaggcgcc

SEQ ID NO: 3209 - DNA, 21 bp, Homo sapiens
agagacgtagaaggcgccggg

SEQ ID NO: 3210 - DNA, 18 bp, Homo sapiens
agagactgacgagtgcgg

SEQ ID NO: 3211 - DNA, 21 bp, Homo sapiens
agagactggtggctggaggag

SEQ ID NO: 3212 - DNA, 18 bp, Homo sapiens
agagactgtagtagcggc

SEQ ID NO: 3213 - DNA, 18 bp, Homo sapiens
agagagaaaagcgcttca

SEQ ID NO: 3214 - DNA, 19 bp, Homo sapiens
agagagaaagcgggagccc

SEQ ID NO: 3215 - DNA, 17 bp, Homo sapiens
agagagattggtgtttt

SEQ ID NO: 3216 - DNA, 16 bp, Homo sapiens
agagagcggagagcgc

SEQ ID NO: 3217 - DNA, 20 bp, Homo sapiens
agagagctgagagctggagg

SEQ ID NO: 3218 - DNA, 19 bp, Homo sapiens
agagaggcaagatggctac

SEQ ID NO: 3219 - DNA, 18 bp, Homo sapiens
agagaggcttgaggttcg

SEQ ID NO: 3220 - DNA, 18 bp, Homo sapiens
agagagggatagtcggag

SEQ ID NO: 3221 - DNA, 20 bp, Homo sapiens
agagagggatagtcggagcg

SEQ ID NO: 3222 - DNA, 21 bp, Homo sapiens
agagagggatagtcggagcga

SEQ ID NO: 3223 - DNA, 23 bp, Homo sapiens
agagagggatagtcggagcgagg

SEQ ID NO: 3224 - DNA, 17 bp, Homo sapiens
agagagtggggacgtcc

SEQ ID NO: 3225 - DNA, 18 bp, Homo sapiens
agagagtggggacgtccg

SEQ ID NO: 3226 - DNA, 18 bp, Homo sapiens
agagatagagcttcgcgg

SEQ ID NO: 3227 - DNA, 17 bp, Homo sapiens
agagatcagccaatcaa

SEQ ID NO: 3228 - DNA, 19 bp, Homo sapiens
agagatcatagaaagagaa

SEQ ID NO: 3229 - DNA, 18 bp, Homo sapiens
agagatcgaggtgacagg

SEQ ID NO: 3230 - DNA, 19 bp, Homo sapiens
agagatcgaggtgacaggc

SEQ ID NO: 3231 - DNA, 20 bp, Homo sapiens
agagatcgaggtgacaggcg

SEQ ID NO: 3232 - DNA, 20 bp, Homo sapiens
agagatggtcgcaagatggc

SEQ ID NO: 3233 - DNA, 20 bp, Homo sapiens
agagattgaagatggcggct

SEQ ID NO: 3234 - DNA, 19 bp, Homo sapiens
agagattggtgtttttgtg

SEQ ID NO: 3235 - DNA, 18 bp, Homo sapiens
agagcagagaactcggcg

SEQ ID NO: 3236 - DNA, 19 bp, Homo sapiens
agagcagagtcagccagca

SEQ ID NO: 3237 - DNA, 17 bp, Homo sapiens
agagcaggacactggcg

SEQ ID NO: 3238 - DNA, 19 bp, Homo sapiens
agagcaggacactggcgcc

SEQ ID NO: 3239 - DNA, 21 bp, Homo sapiens
agagccacatggacggagctg

SEQ ID NO: 3240 - DNA, 18 bp, Homo sapiens
agagccagagctgcgagc

SEQ ID NO: 3241 - DNA, 18 bp, Homo sapiens
agagccagagggaaacaa

SEQ ID NO: 3242 - DNA, 22 bp, Homo sapiens
agagcccgagctcgggtgtgcg

SEQ ID NO: 3243 - DNA, 18 bp, Homo sapiens
agagcccgtcgtggcagc

SEQ ID NO: 3244 - DNA, 19 bp, Homo sapiens
gcaggctgggagggagaag

SEQ ID NO: 3245 - DNA, 19 bp, Homo sapiens
gcaggcttggctgcgccct

SEQ ID NO: 3246 - DNA, 16 bp, Homo sapiens
gcagggaagtggagta

SEQ ID NO: 3247 - DNA, 16 bp, Homo sapiens
gcagggaggaagcccg

SEQ ID NO: 3248 - DNA, 17 bp, Homo sapiens
gcagggaggaggaagcg

SEQ ID NO: 3249 - DNA, 19 bp, Homo sapiens
gcagggagggactaagggg

SEQ ID NO: 3250 - DNA, 17 bp, Homo sapiens
gcagggaggggggacga

SEQ ID NO: 3251 - DNA, 20 bp, Homo sapiens
gcagggagtgggctgcagtg

SEQ ID NO: 3252 - DNA, 18 bp, Homo sapiens
gcagggcagaactgggga

SEQ ID NO: 3253 - DNA, 20 bp, Homo sapiens
gcagggcagcagtcacccta

SEQ ID NO: 3254 - DNA, 18 bp, Homo sapiens
gcagggccgggaagcctc

SEQ ID NO: 3255 - DNA, 18 bp, Homo sapiens
gcagggctgtggctacca

SEQ ID NO: 3256 - DNA, 20 bp, Homo sapiens
gcagggctgtggctaccatg

SEQ ID NO: 3257 - DNA, 16 bp, Homo sapiens
gcaggggccggagtcg

SEQ ID NO: 3258 - DNA, 18 bp, Homo sapiens
gcaggggcggcttctagg

SEQ ID NO: 3259 - DNA, 18 bp, Homo sapiens
gcagggggtggtggagca

SEQ ID NO: 3260 - DNA, 18 bp, Homo sapiens
gcaggggtagaagaagga

SEQ ID NO: 3261 - DNA, 22 bp, Homo sapiens
gcaggggtagaagaaggaagtg

SEQ ID NO: 3262 - DNA, 22 bp, Homo sapiens
gcagggtgcgcgatgccttgaa

SEQ ID NO: 3263 - DNA, 19 bp, Homo sapiens
gcagggtggctggaggaag

SEQ ID NO: 3264 - DNA, 17 bp, Homo sapiens
gcaggtagcggtagcga

SEQ ID NO: 3265 - DNA, 18 bp, Homo sapiens
gcaggtatgggctccgcg

SEQ ID NO: 3266 - DNA, 20 bp, Homo sapiens
gcaggtcgaggacggtcgga

SEQ ID NO: 3267 - DNA, 18 bp, Homo sapiens
gcaggtcgggcaggcggg

SEQ ID NO: 3268 - DNA, 20 bp, Homo sapiens
gcaggtgagaaagcgagaca

SEQ ID NO: 3269 - DNA, 18 bp, Homo sapiens
gcaggtgccgctcgcggt

SEQ ID NO: 3270 - DNA, 18 bp, Homo sapiens
gcaggtggcggcgcagtc

SEQ ID NO: 3271 - DNA, 20 bp, Homo sapiens
gcaggttggaggatggttgg

SEQ ID NO: 3272 - DNA, 18 bp, Homo sapiens
gcaggttgtaaatccatg

SEQ ID NO: 3273 - DNA, 21 bp, Homo sapiens
gcagtaaaactgaggaggcgg

SEQ ID NO: 3274 - DNA, 23 bp, Homo sapiens
gcagtaagtgtgtgacgtcgggg

SEQ ID NO: 3275 - DNA, 20 bp, Homo sapiens
gcagtactgggacagttggg

SEQ ID NO: 3276 - DNA, 18 bp, Homo sapiens
gcagtagacgaaggcggc

SEQ ID NO: 3277 - DNA, 20 bp, Homo sapiens
gcagtagacggacagaggag

SEQ ID NO: 3278 - DNA, 17 bp, Homo sapiens
gcagtaggatcggccag

SEQ ID NO: 3279 - DNA, 16 bp, Homo sapiens
gcagtaggcaccaggg

SEQ ID NO: 3280 - DNA, 17 bp, Homo sapiens
gcagtccggaggtgagg

SEQ ID NO: 3281 - DNA, 19 bp, Homo sapiens
gcagtccggaggtgaggcg

SEQ ID NO: 3282 - DNA, 23 bp, Homo sapiens
gcagtccggaggtgaggcggaac

SEQ ID NO: 3283 - DNA, 16 bp, Homo sapiens
gcagtcgacacgctct

SEQ ID NO: 3284 - DNA, 17 bp, Homo sapiens
gcagtcggcaaggagag

SEQ ID NO: 3285 - DNA, 18 bp, Homo sapiens
gcagtcggcaaggagaga

SEQ ID NO: 3286 - DNA, 19 bp, Homo sapiens
gcagtcggcaaggagagac

SEQ ID NO: 3287 - DNA, 20 bp, Homo sapiens
gcagtcggcaaggagagacg

SEQ ID NO: 3288 - DNA, 20 bp, Homo sapiens
gcagtctcagaagggagctg

SEQ ID NO: 3289 - DNA, 16 bp, Homo sapiens
gcagtctctgcatatc

SEQ ID NO: 3290 - DNA, 19 bp, Homo sapiens
gcagtctggagggcgccaa

SEQ ID NO: 3291 - DNA, 18 bp, Homo sapiens
gcagtctggttggagctg

SEQ ID NO: 3292 - DNA, 18 bp, Homo sapiens
gcagtgagttcgacacac

SEQ ID NO: 3293 - DNA, 22 bp, Homo sapiens
gcagtgatggaagggccgcttt

SEQ ID NO: 3294 - DNA, 18 bp, Homo sapiens
gcagtgatgtgaaactgg

SEQ ID NO: 3295 - DNA, 19 bp, Homo sapiens
gcagtgccgtagtagcggg

SEQ ID NO: 3296 - DNA, 18 bp, Homo sapiens
gcagtgcgcgggaaccgc

SEQ ID NO: 3297 - DNA, 20 bp, Homo sapiens
gcagtgcggataaacaggaa

SEQ ID NO: 3298 - DNA, 18 bp, Homo sapiens
gcagtgcggccccgagga

SEQ ID NO: 3299 - DNA, 17 bp, Homo sapiens
gcagtggggtttgagat

SEQ ID NO: 3300 - DNA, 21 bp, Homo sapiens
gcagtgtaaacagagacgctg

SEQ ID NO: 3301 - DNA, 20 bp, Homo sapiens
agagccgcgcacgggactgg

SEQ ID NO: 3302 - DNA, 20 bp, Homo sapiens
agagcctgtggaaaacactt

SEQ ID NO: 3303 - DNA, 19 bp, Homo sapiens
agagccttagccgacggaa

SEQ ID NO: 3304 - DNA, 18 bp, Homo sapiens
agagcgacagagacattt

SEQ ID NO: 3305 - DNA, 18 bp, Homo sapiens
agagcgactgccggaagt

SEQ ID NO: 3306 - DNA, 19 bp, Homo sapiens
agagcgactgccggaagtg

SEQ ID NO: 3307 - DNA, 18 bp, Homo sapiens
agagcgcaatggcggcaa

SEQ ID NO: 3308 - DNA, 18 bp, Homo sapiens
agagcgcagcgcgcacgc

SEQ ID NO: 3309 - DNA, 24 bp, Homo sapiens
agagcgcggcgcccgggcctggcg

SEQ ID NO: 3310 - DNA, 18 bp, Homo sapiens
agagcggagctccaagcc

SEQ ID NO: 3311 - DNA, 18 bp, Homo sapiens
agagcgggcagccttcca

SEQ ID NO: 3312 - DNA, 19 bp, Homo sapiens
agagcggtttggtcgttcg

SEQ ID NO: 3313 - DNA, 19 bp, Homo sapiens
agagcgttgaggggagttc

SEQ ID NO: 3314 - DNA, 16 bp, Homo sapiens
agagctcagccaacct

SEQ ID NO: 3315 - DNA, 17 bp, Homo sapiens
agagctcgccactcctt

SEQ ID NO: 3316 - DNA, 18 bp, Homo sapiens
agagctgcgaccgttaac

SEQ ID NO: 3317 - DNA, 21 bp, Homo sapiens
agaggaaactgcagaggagga

SEQ ID NO: 3318 - DNA, 18 bp, Homo sapiens
agaggaagaggcgttgcg

SEQ ID NO: 3319 - DNA, 18 bp, Homo sapiens
agaggaatcgtatctcca

SEQ ID NO: 3320 - DNA, 19 bp, Homo sapiens
agaggaccggccgccccat

SEQ ID NO: 3321 - DNA, 17 bp, Homo sapiens
agaggagaggagaatgg

SEQ ID NO: 3322 - DNA, 18 bp, Homo sapiens
agaggagcagcgcggttc

SEQ ID NO: 3323 - DNA, 18 bp, Homo sapiens
agaggagcccgagcctgg

SEQ ID NO: 3324 - DNA, 18 bp, Homo sapiens
agaggagccggagacgcg

SEQ ID NO: 3325 - DNA, 20 bp, Homo sapiens
agaggaggaagcccgggagg

SEQ ID NO: 3326 - DNA, 16 bp, Homo sapiens
agaggaggagctcgct

SEQ ID NO: 3327 - DNA, 18 bp, Homo sapiens
agaggaggaggtgagctg

SEQ ID NO: 3328 - DNA, 22 bp, Homo sapiens
agaggaggcgggagagtgagag

SEQ ID NO: 3329 - DNA, 16 bp, Homo sapiens
agaggagtgaaggcgg

SEQ ID NO: 3330 - DNA, 19 bp, Homo sapiens
agaggcagccagaacctag

SEQ ID NO: 3331 - DNA, 20 bp, Homo sapiens
agaggcagcggttggaggcg

SEQ ID NO: 3332 - DNA, 23 bp, Homo sapiens
agaggcagttggaagatggcgga

SEQ ID NO: 3333 - DNA, 18 bp, Homo sapiens
agaggccgggctgagacg

SEQ ID NO: 3334 - DNA, 18 bp, Homo sapiens
agaggcgagcgtgagccc

SEQ ID NO: 3335 - DNA, 17 bp, Homo sapiens
agaggcggaaaggatgg

SEQ ID NO: 3336 - DNA, 19 bp, Homo sapiens
agaggcggcgctgtccctg

SEQ ID NO: 3337 - DNA, 16 bp, Homo sapiens
agaggcggcggaatgg

SEQ ID NO: 3338 - DNA, 20 bp, Homo sapiens
agaggcgggcgtgccagtcc

SEQ ID NO: 3339 - DNA, 19 bp, Homo sapiens
agaggctccgtcttgtgca

SEQ ID NO: 3340 - DNA, 17 bp, Homo sapiens
agaggctgctgaggcgc

SEQ ID NO: 3341 - DNA, 18 bp, Homo sapiens
agaggcttgaggttcggg

SEQ ID NO: 3342 - DNA, 16 bp, Homo sapiens
agagggaagtgaatca

SEQ ID NO: 3343 - DNA, 20 bp, Homo sapiens
agagggagcccggccgggac

SEQ ID NO: 3344 - DNA, 18 bp, Homo sapiens
agagggaggctgcgtctg

SEQ ID NO: 3345 - DNA, 18 bp, Homo sapiens
agagggcaaagaagctga

SEQ ID NO: 3346 - DNA, 19 bp, Homo sapiens
agagggcactgggaagtca

SEQ ID NO: 3347 - DNA, 22 bp, Homo sapiens
agagggctaccttgtgaagaag

SEQ ID NO: 3348 - DNA, 18 bp, Homo sapiens
agagggctcgcgcccgcc

SEQ ID NO: 3349 - DNA, 18 bp, Homo sapiens
agagggctgtcggcgcag

SEQ ID NO: 3350 - DNA, 15 bp, Homo sapiens
agagggtgaaatgct

SEQ ID NO: 3351 - DNA, 18 bp, Homo sapiens
agaggtctcattgcgctc

SEQ ID NO: 3352 - DNA, 20 bp, Homo sapiens
agaggtgcttgtgtttttgt

SEQ ID NO: 3353 - DNA, 18 bp, Homo sapiens
agaggtggcgtggacagg

SEQ ID NO: 3354 - DNA, 19 bp, Homo sapiens
agaggtgggagtcggagcg

SEQ ID NO: 3355 - DNA, 20 bp, Homo sapiens
agaggtggttgtgaggcaga

SEQ ID NO: 3356 - DNA, 19 bp, Homo sapiens
agaggttggcagcttcgat

SEQ ID NO: 3357 - DNA, 24 bp, Homo sapiens
agagtagctctttcctttcctcca

SEQ ID NO: 3358 - DNA, 18 bp, Homo sapiens
gcagtgtcgggaagatgg

SEQ ID NO: 3359 - DNA, 24 bp, Homo sapiens
gcagtgtgagtaacacactgaagc

SEQ ID NO: 3360 - DNA, 18 bp, Homo sapiens
gcagtgtgggcgacagga

SEQ ID NO: 3361 - DNA, 19 bp, Homo sapiens
gcagttgaggaggagggag

SEQ ID NO: 3362 - DNA, 18 bp, Homo sapiens
gcagttggacccagcagc

SEQ ID NO: 3363 - DNA, 20 bp, Homo sapiens
gcagttggacccagcagccc

SEQ ID NO: 3364 - DNA, 18 bp, Homo sapiens
gcagttggctggaggggc

SEQ ID NO: 3365 - DNA, 18 bp, Homo sapiens
gcagtttaattctccggc

SEQ ID NO: 3366 - DNA, 17 bp, Homo sapiens
gcagtttgaatcgcggt

SEQ ID NO: 3367 - DNA, 16 bp, Homo sapiens
gcagtttgttggagct

SEQ ID NO: 3368 - DNA, 17 bp, Homo sapiens
gcataagaaggggaacg

SEQ ID NO: 3369 - DNA, 18 bp, Homo sapiens
gcatactcagcggcagag

SEQ ID NO: 3370 - DNA, 21 bp, Homo sapiens
gcatacttgtgcggttccaag

SEQ ID NO: 3371 - DNA, 19 bp, Homo sapiens
gcatagctttctcaactat

SEQ ID NO: 3372 - DNA, 18 bp, Homo sapiens
gcatcgggtaggtagggg

SEQ ID NO: 3373 - DNA, 21 bp, Homo sapiens
gcatctgcgattgcatttttc

SEQ ID NO: 3374 - DNA, 19 bp, Homo sapiens
gcatctggagggaccaccg

SEQ ID NO: 3375 - DNA, 20 bp, Homo sapiens
gcatgactgccgtcggcgtg

SEQ ID NO: 3376 - DNA, 23 bp, Homo sapiens
gcatgcgctctcattgcagcctc

SEQ ID NO: 3377 - DNA, 19 bp, Homo sapiens
gcatggagggctctggggg

SEQ ID NO: 3378 - DNA, 23 bp, Homo sapiens
gcatggcctaagccggtcagcta

SEQ ID NO: 3379 - DNA, 18 bp, Homo sapiens
gcatggcgcgtacgaagc

SEQ ID NO: 3380 - DNA, 19 bp, Homo sapiens
gcatggctgtctctgcagt

SEQ ID NO: 3381 - DNA, 17 bp, Homo sapiens
gcatgtcagaggctgcc

SEQ ID NO: 3382 - DNA, 18 bp, Homo sapiens
gcatgtgcgggagactca

SEQ ID NO: 3383 - DNA, 18 bp, Homo sapiens
gcattaaacggttgcagg

SEQ ID NO: 3384 - DNA, 18 bp, Homo sapiens
gcattcggcagagggcgc

SEQ ID NO: 3385 - DNA, 17 bp, Homo sapiens
gcattcgggccgagatg

SEQ ID NO: 3386 - DNA, 18 bp, Homo sapiens
gcattcgggccgagatgt

SEQ ID NO: 3387 - DNA, 18 bp, Homo sapiens
gcattgcagactgcggag

SEQ ID NO: 3388 - DNA, 18 bp, Homo sapiens
gcattgccgtttttgctc

SEQ ID NO: 3389 - DNA, 17 bp, Homo sapiens
gcattgggagagcggcg

SEQ ID NO: 3390 - DNA, 22 bp, Homo sapiens
gcattgtgggattggatgagtc

SEQ ID NO: 3391 - DNA, 19 bp, Homo sapiens
gcatttcctctctagctgt

SEQ ID NO: 3392 - DNA, 22 bp, Homo sapiens
gcatttggcgagaaggctggcg

SEQ ID NO: 3393 - DNA, 18 bp, Homo sapiens
gccaaacctagccccaaa

SEQ ID NO: 3394 - DNA, 20 bp, Homo sapiens
gccaaacctagccccaaacc

SEQ ID NO: 3395 - DNA, 21 bp, Homo sapiens
gccaaacctagccccaaaccc

SEQ ID NO: 3396 - DNA, 23 bp, Homo sapiens
gccaaagccctaagaaacacagc

SEQ ID NO: 3397 - DNA, 20 bp, Homo sapiens
gccaacagcaacgcggacca

SEQ ID NO: 3398 - DNA, 18 bp, Homo sapiens
gccaacatgctctgtctg

SEQ ID NO: 3399 - DNA, 20 bp, Homo sapiens
gccaacatggcggcggaacg

SEQ ID NO: 3400 - DNA, 21 bp, Homo sapiens
gccaacccttttcttccgcac

SEQ ID NO: 3401 - DNA, 20 bp, Homo sapiens
gccaactccgctccccgcgc

SEQ ID NO: 3402 - DNA, 16 bp, Homo sapiens
gccaagactgagccgg

SEQ ID NO: 3403 - DNA, 20 bp, Homo sapiens
gccaagactgagccggcggc

SEQ ID NO: 3404 - DNA, 20 bp, Homo sapiens
gccaagatggcggtagcgat

SEQ ID NO: 3405 - DNA, 23 bp, Homo sapiens
gccaagcagccgccaccacgctg

SEQ ID NO: 3406 - DNA, 18 bp, Homo sapiens
gccaagggaaaagatcgt

SEQ ID NO: 3407 - DNA, 16 bp, Homo sapiens
gccaatgggggcgcgc

SEQ ID NO: 3408 - DNA, 18 bp, Homo sapiens
gccaatggtcgctccctg

SEQ ID NO: 3409 - DNA, 22 bp, Homo sapiens
gccacagggcagggggcgtctg

SEQ ID NO: 3410 - DNA, 18 bp, Homo sapiens
gccacatggacggagctg

SEQ ID NO: 3411 - DNA, 19 bp, Homo sapiens
gccacatggacggagctgc

SEQ ID NO: 3412 - DNA, 21 bp, Homo sapiens
gccacatggacggagctgccg

SEQ ID NO: 3413 - DNA, 20 bp, Homo sapiens
gccaccacccactccggaca

SEQ ID NO: 3414 - DNA, 20 bp, Homo sapiens
gccaccgcgggtcgcctcgg

SEQ ID NO: 3415 - DNA, 20 bp, Homo sapiens
agagtcgccggtggccgcgg

SEQ ID NO: 3416 - DNA, 21 bp, Homo sapiens
agagtcgggttacaagatggc

SEQ ID NO: 3417 - DNA, 21 bp, Homo sapiens
agagtgacctttgcatctgcc

SEQ ID NO: 3418 - DNA, 18 bp, Homo sapiens
agagtgagcagccctagc

SEQ ID NO: 3419 - DNA, 19 bp, Homo sapiens
agagtgagcagccctagca

SEQ ID NO: 3420 - DNA, 18 bp, Homo sapiens
agagtgcggggtggcagc

SEQ ID NO: 3421 - DNA, 20 bp, Homo sapiens
agagtgctctgcgccgtgaa

SEQ ID NO: 3422 - DNA, 16 bp, Homo sapiens
agagtgctgggcgggc

SEQ ID NO: 3423 - DNA, 19 bp, Homo sapiens
agagtggctctaacaagtg

SEQ ID NO: 3424 - DNA, 17 bp, Homo sapiens
agagttctacgagggag

SEQ ID NO: 3425 - DNA, 18 bp, Homo sapiens
agagttctacgagggagg

SEQ ID NO: 3426 - DNA, 20 bp, Homo sapiens
agagttggaggtggtggcgt

SEQ ID NO: 3427 - DNA, 18 bp, Homo sapiens
agagttgggttgtgggtc

SEQ ID NO: 3428 - DNA, 24 bp, Homo sapiens
agagttggttctggaggcggcgga

SEQ ID NO: 3429 - DNA, 20 bp, Homo sapiens
agagttggttggtgttgggc

SEQ ID NO: 3430 - DNA, 20 bp, Homo sapiens
agagtttcccgggcactcac

SEQ ID NO: 3431 - DNA, 18 bp, Homo sapiens
agatacccagctgtgcgg

SEQ ID NO: 3432 - DNA, 19 bp, Homo sapiens
agatccgcggaagggcaga

SEQ ID NO: 3433 - DNA, 20 bp, Homo sapiens
agatcgccgaagcgtcggac

SEQ ID NO: 3434 - DNA, 21 bp, Homo sapiens
agatcgccgaagcgtcggact

SEQ ID NO: 3435 - DNA, 23 bp, Homo sapiens
agatcgccgaagcgtcggactac

SEQ ID NO: 3436 - DNA, 22 bp, Homo sapiens
agatgaacgggcggaagcagag

SEQ ID NO: 3437 - DNA, 18 bp, Homo sapiens
agatgaatgggaagcggc

SEQ ID NO: 3438 - DNA, 22 bp, Homo sapiens
agatgacgagactggcttcggg

SEQ ID NO: 3439 - DNA, 19 bp, Homo sapiens
agatgccacgtttggcgtg

SEQ ID NO: 3440 - DNA, 17 bp, Homo sapiens
agatgcgagcactgcgg

SEQ ID NO: 3441 - DNA, 17 bp, Homo sapiens
agatgctgcggaatctg

SEQ ID NO: 3442 - DNA, 19 bp, Homo sapiens
agatgcttctgggtcgcgg

SEQ ID NO: 3443 - DNA, 18 bp, Homo sapiens
agatggcgctcaccaggt

SEQ ID NO: 3444 - DNA, 18 bp, Homo sapiens
agatggcggaaatggatc

SEQ ID NO: 3445 - DNA, 20 bp, Homo sapiens
agatggcggaagcggagtga

SEQ ID NO: 3446 - DNA, 21 bp, Homo sapiens
agatggcggaagcggagtgag

SEQ ID NO: 3447 - DNA, 18 bp, Homo sapiens
agatggcggacaaaacgc

SEQ ID NO: 3448 - DNA, 18 bp, Homo sapiens
agatggcggcctgaacgc

SEQ ID NO: 3449 - DNA, 24 bp, Homo sapiens
agatggcggcgacggcggccgcag

SEQ ID NO: 3450 - DNA, 21 bp, Homo sapiens
agatggcggcgctaggggaac

SEQ ID NO: 3451 - DNA, 18 bp, Homo sapiens
agatggcggcgctgaagg

SEQ ID NO: 3452 - DNA, 21 bp, Homo sapiens
agatggcggcgctgactcctg

SEQ ID NO: 3453 - DNA, 17 bp, Homo sapiens
agatggcggcggaaacg

SEQ ID NO: 3454 - DNA, 18 bp, Homo sapiens
agatggcggcgggttgct

SEQ ID NO: 3455 - DNA, 15 bp, Homo sapiens
agatggcggctgcgg

SEQ ID NO: 3456 - DNA, 20 bp, Homo sapiens
agatggcggggaacgactgc

SEQ ID NO: 3457 - DNA, 16 bp, Homo sapiens
agatggcgtcccgcaa

SEQ ID NO: 3458 - DNA, 17 bp, Homo sapiens
agatggcgtcgaagata

SEQ ID NO: 3459 - DNA, 22 bp, Homo sapiens
agatggctgcgcggtgctccac

SEQ ID NO: 3460 - DNA, 23 bp, Homo sapiens
agatggctgcgcggtgctccaca

SEQ ID NO: 3461 - DNA, 24 bp, Homo sapiens
agatggtgcagtacaagaatcgtc

SEQ ID NO: 3462 - DNA, 18 bp, Homo sapiens
agatgtctggccgcggta

SEQ ID NO: 3463 - DNA, 16 bp, Homo sapiens
agattacaacggtgat

SEQ ID NO: 3464 - DNA, 18 bp, Homo sapiens
agattcgcacaaacccgg

SEQ ID NO: 3465 - DNA, 20 bp, Homo sapiens
agattcgcgcagaccaggaa

SEQ ID NO: 3466 - DNA, 21 bp, Homo sapiens
agattcgcgcagaccaggaag

SEQ ID NO: 3467 - DNA, 18 bp, Homo sapiens
agattggtgtttttgtga

SEQ ID NO: 3468 - DNA, 17 bp, Homo sapiens
agattgtgcatgccgtg

SEQ ID NO: 3469 - DNA, 18 bp, Homo sapiens
agatttttgcggctattt

SEQ ID NO: 3470 - DNA, 20 bp, Homo sapiens
agcaaacaggtctgggaggc

SEQ ID NO: 3471 - DNA, 23 bp, Homo sapiens
agcaaacatggatcaagaaactg

SEQ ID NO: 3472 - DNA, 19 bp, Homo sapiens
gccaccggcaaggggtgcg

SEQ ID NO: 3473 - DNA, 19 bp, Homo sapiens
gccacgagtcggcattgtc

SEQ ID NO: 3474 - DNA, 22 bp, Homo sapiens
gccacgagtcggcattgtcagg

SEQ ID NO: 3475 - DNA, 17 bp, Homo sapiens
gccacgcagcggcggga

SEQ ID NO: 3476 - DNA, 24 bp, Homo sapiens
gccacggcagggacacgcggaacc

SEQ ID NO: 3477 - DNA, 18 bp, Homo sapiens
gccacggcaggtagcgag

SEQ ID NO: 3478 - DNA, 17 bp, Homo sapiens
gccactatgtctggacg

SEQ ID NO: 3479 - DNA, 20 bp, Homo sapiens
gccactatgtctggacgtgg

SEQ ID NO: 3480 - DNA, 18 bp, Homo sapiens
gccactccagcctaatcc

SEQ ID NO: 3481 - DNA, 16 bp, Homo sapiens
gccactcggagctgct

SEQ ID NO: 3482 - DNA, 20 bp, Homo sapiens
gccactgccactgccacctc

SEQ ID NO: 3483 - DNA, 17 bp, Homo sapiens
gccactggggcagccag

SEQ ID NO: 3484 - DNA, 17 bp, Homo sapiens
gccactggggtcttctc

SEQ ID NO: 3485 - DNA, 21 bp, Homo sapiens
gccactgtgctcctgggcggc

SEQ ID NO: 3486 - DNA, 19 bp, Homo sapiens
gccagaaatccgaccggac

SEQ ID NO: 3487 - DNA, 24 bp, Homo sapiens
gccagacagtgtagaacctgcggc

SEQ ID NO: 3488 - DNA, 19 bp, Homo sapiens
gccagagagggcgacgggg

SEQ ID NO: 3489 - DNA, 18 bp, Homo sapiens
gccagagcccgcggtcac

SEQ ID NO: 3490 - DNA, 17 bp, Homo sapiens
gccagaggacctgggcg

SEQ ID NO: 3491 - DNA, 20 bp, Homo sapiens
gccagaggcgcggaaggaag

SEQ ID NO: 3492 - DNA, 18 bp, Homo sapiens
gccagagggaaacaaacg

SEQ ID NO: 3493 - DNA, 18 bp, Homo sapiens
gccagagggatgggcggg

SEQ ID NO: 3494 - DNA, 18 bp, Homo sapiens
gccagagtgggggactag

SEQ ID NO: 3495 - DNA, 17 bp, Homo sapiens
gccagccggcttggcta

SEQ ID NO: 3496 - DNA, 19 bp, Homo sapiens
gccagccggcttggctagc

SEQ ID NO: 3497 - DNA, 18 bp, Homo sapiens
gccagcgccccagcgagg

SEQ ID NO: 3498 - DNA, 18 bp, Homo sapiens
gccagcgggcggcaggag

SEQ ID NO: 3499 - DNA, 17 bp, Homo sapiens
gccagcggtgagtgcta

SEQ ID NO: 3500 - DNA, 18 bp, Homo sapiens
gccagctcaggatgagga

SEQ ID NO: 3501 - DNA, 19 bp, Homo sapiens
gccagctcgccgctcgcta

SEQ ID NO: 3502 - DNA, 19 bp, Homo sapiens
gccagctggcaaggggctg

SEQ ID NO: 3503 - DNA, 18 bp, Homo sapiens
gccaggaccgctgtactc

SEQ ID NO: 3504 - DNA, 16 bp, Homo sapiens
gccaggagcggagccg

SEQ ID NO: 3505 - DNA, 20 bp, Homo sapiens
gccaggagctggttctggtg

SEQ ID NO: 3506 - DNA, 18 bp, Homo sapiens
gccaggatggcgactccg

SEQ ID NO: 3507 - DNA, 19 bp, Homo sapiens
gccaggatggcgactccga

SEQ ID NO: 3508 - DNA, 22 bp, Homo sapiens
gccaggcagcgtcggccgcgtc

SEQ ID NO: 3509 - DNA, 18 bp, Homo sapiens
gccaggcaggaagatggc

SEQ ID NO: 3510 - DNA, 19 bp, Homo sapiens
gccaggccagcctcggagc

SEQ ID NO: 3511 - DNA, 18 bp, Homo sapiens
gccaggcggaggtgagtg

SEQ ID NO: 3512 - DNA, 20 bp, Homo sapiens
gccaggcggaggtgagtgcg

SEQ ID NO: 3513 - DNA, 18 bp, Homo sapiens
gccaggcgggggaacgtg

SEQ ID NO: 3514 - DNA, 20 bp, Homo sapiens
gccaggctctgaggcccacg

SEQ ID NO: 3515 - DNA, 17 bp, Homo sapiens
gccaggctgcggagcgg

SEQ ID NO: 3516 - DNA, 18 bp, Homo sapiens
gccaggctgcggagcgga

SEQ ID NO: 3517 - DNA, 22 bp, Homo sapiens
gccaggctgcggagcggacgga

SEQ ID NO: 3518 - DNA, 24 bp, Homo sapiens
gccaggctgcggagcggacggacg

SEQ ID NO: 3519 - DNA, 16 bp, Homo sapiens
gccaggctgtggggac

SEQ ID NO: 3520 - DNA, 19 bp, Homo sapiens
gccaggctgtggtggcgcg

SEQ ID NO: 3521 - DNA, 18 bp, Homo sapiens
gccagggcctggtcggac

SEQ ID NO: 3522 - DNA, 19 bp, Homo sapiens
gccagggcgtggaagcgga

SEQ ID NO: 3523 - DNA, 20 bp, Homo sapiens
gccagggctgagagagatgg

SEQ ID NO: 3524 - DNA, 22 bp, Homo sapiens
gccaggtctctagcagctgccg

SEQ ID NO: 3525 - DNA, 16 bp, Homo sapiens
gccaggtgctgggggc

SEQ ID NO: 3526 - DNA, 19 bp, Homo sapiens
gccagtatgttggagttgg

SEQ ID NO: 3527 - DNA, 21 bp, Homo sapiens
gccatcaggtaggctgcgttg

SEQ ID NO: 3528 - DNA, 18 bp, Homo sapiens
gccatcatgccagacccg

SEQ ID NO: 3529 - DNA, 18 bp, Homo sapiens
agcaaagcccccacgccc

SEQ ID NO: 3530 - DNA, 18 bp, Homo sapiens
agcaaccggtctggcggc

SEQ ID NO: 3531 - DNA, 19 bp, Homo sapiens
agcaacggctctgcggcca

SEQ ID NO: 3532 - DNA, 19 bp, Homo sapiens
agcaacgtctccgagcagg

SEQ ID NO: 3533 - DNA, 17 bp, Homo sapiens
agcaactgcgggactgc

SEQ ID NO: 3534 - DNA, 19 bp, Homo sapiens
agcaagagagctagagagc

SEQ ID NO: 3535 - DNA, 21 bp, Homo sapiens
agcaaggcggcaaagctcggg

SEQ ID NO: 3536 - DNA, 18 bp, Homo sapiens
agcaatgtggctcctgtg

SEQ ID NO: 3537 - DNA, 17 bp, Homo sapiens
agcacagaacgggacga

SEQ ID NO: 3538 - DNA, 22 bp, Homo sapiens
agcaccagggccggccgccacc

SEQ ID NO: 3539 - DNA, 19 bp, Homo sapiens
agcaccgagcagcttggct

SEQ ID NO: 3540 - DNA, 19 bp, Homo sapiens
agcaccggagagggcgcac

SEQ ID NO: 3541 - DNA, 18 bp, Homo sapiens
agcaccgggaggaaagtt

SEQ ID NO: 3542 - DNA, 22 bp, Homo sapiens
agcacgctcggagccgccgcgc

SEQ ID NO: 3543 - DNA, 19 bp, Homo sapiens
agcacgctggcctggggca

SEQ ID NO: 3544 - DNA, 18 bp, Homo sapiens
agcacggcgggaaccggc

SEQ ID NO: 3545 - DNA, 18 bp, Homo sapiens
agcactctgacctagcag

SEQ ID NO: 3546 - DNA, 17 bp, Homo sapiens
agcactggttggagcgc

SEQ ID NO: 3547 - DNA, 18 bp, Homo sapiens
agcagaaattgttccgga

SEQ ID NO: 3548 - DNA, 18 bp, Homo sapiens
agcagaaccccaggactg

SEQ ID NO: 3549 - DNA, 18 bp, Homo sapiens
agcagacgtccagagcag

SEQ ID NO: 3550 - DNA, 18 bp, Homo sapiens
agcagagaactgagctct

SEQ ID NO: 3551 - DNA, 18 bp, Homo sapiens
agcagagacagtggaggg

SEQ ID NO: 3552 - DNA, 19 bp, Homo sapiens
agcagagacgtagaaggcg

SEQ ID NO: 3553 - DNA, 18 bp, Homo sapiens
agcagaggcagggaccac

SEQ ID NO: 3554 - DNA, 21 bp, Homo sapiens
agcagaggggtcggaaaggga

SEQ ID NO: 3555 - DNA, 20 bp, Homo sapiens
agcagagtcaggtgcggacg

SEQ ID NO: 3556 - DNA, 19 bp, Homo sapiens
agcagatgaggaagtggca

SEQ ID NO: 3557 - DNA, 17 bp, Homo sapiens
agcagcaaacagctctc

SEQ ID NO: 3558 - DNA, 19 bp, Homo sapiens
agcagcaaacagctctcaa

SEQ ID NO: 3559 - DNA, 18 bp, Homo sapiens
agcagcagcagcagcagc

SEQ ID NO: 3560 - DNA, 19 bp, Homo sapiens
agcagcagcctcggtgcga

SEQ ID NO: 3561 - DNA, 18 bp, Homo sapiens
agcagcagcgaggacgcc

SEQ ID NO: 3562 - DNA, 19 bp, Homo sapiens
agcagcagcgccgggtccc

SEQ ID NO: 3563 - DNA, 19 bp, Homo sapiens
agcagccagcccggcccgc

SEQ ID NO: 3564 - DNA, 22 bp, Homo sapiens
agcagccaggagtcatgagcga

SEQ ID NO: 3565 - DNA, 20 bp, Homo sapiens
agcagcctgaggtgagtgtt

SEQ ID NO: 3566 - DNA, 22 bp, Homo sapiens
agcagcgcagcgggcgcgccgc

SEQ ID NO: 3567 - DNA, 18 bp, Homo sapiens
agcagcggccgcaggtcc

SEQ ID NO: 3568 - DNA, 22 bp, Homo sapiens
agcagcgggcagcggcccgcgg

SEQ ID NO: 3569 - DNA, 17 bp, Homo sapiens
agcagcggtggcagaca

SEQ ID NO: 3570 - DNA, 17 bp, Homo sapiens
agcagctggaacgggag

SEQ ID NO: 3571 - DNA, 19 bp, Homo sapiens
agcagctggcggacgcgac

SEQ ID NO: 3572 - DNA, 16 bp, Homo sapiens
agcagctgtcgcgcca

SEQ ID NO: 3573 - DNA, 18 bp, Homo sapiens
agcaggaagaggaggctt

SEQ ID NO: 3574 - DNA, 18 bp, Homo sapiens
agcaggaagcgtttgcgg

SEQ ID NO: 3575 - DNA, 24 bp, Homo sapiens
agcaggacgttctcaccaggagag

SEQ ID NO: 3576 - DNA, 17 bp, Homo sapiens
agcaggagcgccgagac

SEQ ID NO: 3577 - DNA, 18 bp, Homo sapiens
agcaggcctggttgcagc

SEQ ID NO: 3578 - DNA, 16 bp, Homo sapiens
agcaggcggcgaagat

SEQ ID NO: 3579 - DNA, 21 bp, Homo sapiens
agcagggaggcaaggcccgcg

SEQ ID NO: 3580 - DNA, 18 bp, Homo sapiens
agcagggaggcctccaca

SEQ ID NO: 3581 - DNA, 18 bp, Homo sapiens
agcaggggaaggggaacg

SEQ ID NO: 3582 - DNA, 17 bp, Homo sapiens
agcaggggcgccgtggg

SEQ ID NO: 3583 - DNA, 19 bp, Homo sapiens
agcagggtcccatccgagc

SEQ ID NO: 3584 - DNA, 17 bp, Homo sapiens
agcagggtggcgcgggt

SEQ ID NO: 3585 - DNA, 18 bp, Homo sapiens
agcaggtggtgctgctac

SEQ ID NO: 3586 - DNA, 17 bp, Homo sapiens
gccatcccctcagagcg

SEQ ID NO: 3587 - DNA, 17 bp, Homo sapiens
gccatcggacggaagcc

SEQ ID NO: 3588 - DNA, 18 bp, Homo sapiens
gccatcgtgagttccagg

SEQ ID NO: 3589 - DNA, 17 bp, Homo sapiens
gccatctcgccgtgaga

SEQ ID NO: 3590 - DNA, 18 bp, Homo sapiens
gccatgagcgcgctgctg

SEQ ID NO: 3591 - DNA, 19 bp, Homo sapiens
gccatgcccggaggtctgc

SEQ ID NO: 3592 - DNA, 19 bp, Homo sapiens
gccatggaactggcggacg

SEQ ID NO: 3593 - DNA, 18 bp, Homo sapiens
gccatggagctggaggta

SEQ ID NO: 3594 - DNA, 19 bp, Homo sapiens
gccatggagctggaggtac

SEQ ID NO: 3595 - DNA, 18 bp, Homo sapiens
gccatggcggcgaacctg

SEQ ID NO: 3596 - DNA, 19 bp, Homo sapiens
gccatggcggcgaacctga

SEQ ID NO: 3597 - DNA, 17 bp, Homo sapiens
gccatggcggggaactg

SEQ ID NO: 3598 - DNA, 18 bp, Homo sapiens
gccatgggccgccgagcc

SEQ ID NO: 3599 - DNA, 18 bp, Homo sapiens
gccatggggtcggagctg

SEQ ID NO: 3600 - DNA, 23 bp, Homo sapiens
gccatggtaaggactgaggctac

SEQ ID NO: 3601 - DNA, 18 bp, Homo sapiens
gccatgtcggactcggcg

SEQ ID NO: 3602 - DNA, 20 bp, Homo sapiens
gccatgtcggactcggcgcc

SEQ ID NO: 3603 - DNA, 18 bp, Homo sapiens
gccattcccggatccgcc

SEQ ID NO: 3604 - DNA, 18 bp, Homo sapiens
gccattcctagttaaggc

SEQ ID NO: 3605 - DNA, 18 bp, Homo sapiens
gccattgcagttggaccc

SEQ ID NO: 3606 - DNA, 18 bp, Homo sapiens
gccatttgatttaaaaga

SEQ ID NO: 3607 - DNA, 19 bp, Homo sapiens
gccattttggtgcgagaga

SEQ ID NO: 3608 - DNA, 18 bp, Homo sapiens
gccattttgtaaggttct

SEQ ID NO: 3609 - DNA, 19 bp, Homo sapiens
gccattttgtaaggttctc

SEQ ID NO: 3610 - DNA, 18 bp, Homo sapiens
gccattttgtgaagcggc

SEQ ID NO: 3611 - DNA, 19 bp, Homo sapiens
gccattttgtgaagcggcg

SEQ ID NO: 3612 - DNA, 20 bp, Homo sapiens
gcccaactcccagacacctc

SEQ ID NO: 3613 - DNA, 17 bp, Homo sapiens
gcccaagatgattccag

SEQ ID NO: 3614 - DNA, 21 bp, Homo sapiens
gcccaagatggtgagtgagct

SEQ ID NO: 3615 - DNA, 22 bp, Homo sapiens
gcccaagatggtgagtgagctg

SEQ ID NO: 3616 - DNA, 18 bp, Homo sapiens
gcccaccctggcctagtc

SEQ ID NO: 3617 - DNA, 18 bp, Homo sapiens
gcccagaggctgctgagg

SEQ ID NO: 3618 - DNA, 19 bp, Homo sapiens
gcccagaggctgctgaggc

SEQ ID NO: 3619 - DNA, 21 bp, Homo sapiens
gcccagaggctgctgaggcgc

SEQ ID NO: 3620 - DNA, 17 bp, Homo sapiens
gcccagcgagttccaga

SEQ ID NO: 3621 - DNA, 22 bp, Homo sapiens
gcccagcggagtaggggctgcg

SEQ ID NO: 3622 - DNA, 18 bp, Homo sapiens
gcccaggagaccagaaca

SEQ ID NO: 3623 - DNA, 19 bp, Homo sapiens
gcccagttacgtaaccctg

SEQ ID NO: 3624 - DNA, 22 bp, Homo sapiens
gcccagttgttactcaggtgcg

SEQ ID NO: 3625 - DNA, 15 bp, Homo sapiens
gcccatagccggacg

SEQ ID NO: 3626 - DNA, 17 bp, Homo sapiens
gcccatcccgatggctg

SEQ ID NO: 3627 - DNA, 18 bp, Homo sapiens
gcccatctatcagcaggc

SEQ ID NO: 3628 - DNA, 22 bp, Homo sapiens
gcccatgggggtggcggggcgg

SEQ ID NO: 3629 - DNA, 18 bp, Homo sapiens
gccccacgtgaggcttgg

SEQ ID NO: 3630 - DNA, 17 bp, Homo sapiens
gccccagcctcgggagg

SEQ ID NO: 3631 - DNA, 18 bp, Homo sapiens
gccccagcggtgcttcta

SEQ ID NO: 3632 - DNA, 17 bp, Homo sapiens
gccccaggcgagggcgc

SEQ ID NO: 3633 - DNA, 18 bp, Homo sapiens
gcccccaagcgccagtcc

SEQ ID NO: 3634 - DNA, 22 bp, Homo sapiens
gcccccggcggctgaaagccgg

SEQ ID NO: 3635 - DNA, 18 bp, Homo sapiens
gccccctccgcccaccgc

SEQ ID NO: 3636 - DNA, 19 bp, Homo sapiens
gccccgaggaggcagtaga

SEQ ID NO: 3637 - DNA, 20 bp, Homo sapiens
gccccgatcgggctaggccg

SEQ ID NO: 3638 - DNA, 18 bp, Homo sapiens
gccccgccgcaagctgag

SEQ ID NO: 3639 - DNA, 18 bp, Homo sapiens
gccccgctccgccgaacc

SEQ ID NO: 3640 - DNA, 22 bp, Homo sapiens
gccccggaagccgttctttggc

SEQ ID NO: 3641 - DNA, 18 bp, Homo sapiens
gccccggcgccccgaagc

SEQ ID NO: 3642 - DNA, 21 bp, Homo sapiens
gccccggcgcgggcgggttct

SEQ ID NO: 3643 - DNA, 19 bp, Homo sapiens
agcagtgtcactgcgtggg

SEQ ID NO: 3644 - DNA, 22 bp, Homo sapiens
agcagtttcaaggaaatgtcaa

SEQ ID NO: 3645 - DNA, 21 bp, Homo sapiens
agcatagctttctcaactatg

SEQ ID NO: 3646 - DNA, 21 bp, Homo sapiens
agcatcgcggtggggatcgaa

SEQ ID NO: 3647 - DNA, 16 bp, Homo sapiens
agcatgatggaagtcg

SEQ ID NO: 3648 - DNA, 17 bp, Homo sapiens
agcatggtaggacttgc

SEQ ID NO: 3649 - DNA, 19 bp, Homo sapiens
agcatgtgcgggagactca

SEQ ID NO: 3650 - DNA, 18 bp, Homo sapiens
agcattcggcagagggcg

SEQ ID NO: 3651 - DNA, 19 bp, Homo sapiens
agcattcggcagagggcgc

SEQ ID NO: 3652 - DNA, 18 bp, Homo sapiens
agcattcgggccgagatg

SEQ ID NO: 3653 - DNA, 17 bp, Homo sapiens
agcatttgattgtggct

SEQ ID NO: 3654 - DNA, 18 bp, Homo sapiens
agccaacccttttcttcc

SEQ ID NO: 3655 - DNA, 20 bp, Homo sapiens
agccaacccttttcttccgc

SEQ ID NO: 3656 - DNA, 17 bp, Homo sapiens
agccaagactgagccgg

SEQ ID NO: 3657 - DNA, 18 bp, Homo sapiens
agccaagactgagccggc

SEQ ID NO: 3658 - DNA, 21 bp, Homo sapiens
agccaagccggagaggaggcg

SEQ ID NO: 3659 - DNA, 18 bp, Homo sapiens
agccactatgtctggacg

SEQ ID NO: 3660 - DNA, 17 bp, Homo sapiens
agccactcagcccttcg

SEQ ID NO: 3661 - DNA, 18 bp, Homo sapiens
agccagacgccctcagac

SEQ ID NO: 3662 - DNA, 19 bp, Homo sapiens
agccagcagagcaggctga

SEQ ID NO: 3663 - DNA, 17 bp, Homo sapiens
agccagcgggcgcgggc

SEQ ID NO: 3664 - DNA, 19 bp, Homo sapiens
agccaggctgcggagcgga

SEQ ID NO: 3665 - DNA, 16 bp, Homo sapiens
agccagtgcaccagac

SEQ ID NO: 3666 - DNA, 19 bp, Homo sapiens
agccatggcagattcctcc

SEQ ID NO: 3667 - DNA, 16 bp, Homo sapiens
agccattgaaggggaa

SEQ ID NO: 3668 - DNA, 18 bp, Homo sapiens
agcccacacccttcttaa

SEQ ID NO: 3669 - DNA, 17 bp, Homo sapiens
agcccagctacgcgacg

SEQ ID NO: 3670 - DNA, 18 bp, Homo sapiens
agccccgcccactacgga

SEQ ID NO: 3671 - DNA, 17 bp, Homo sapiens
agccccgcgggcgggga

SEQ ID NO: 3672 - DNA, 17 bp, Homo sapiens
agccccggagcggagca

SEQ ID NO: 3673 - DNA, 16 bp, Homo sapiens
agccccgtgagggaag

SEQ ID NO: 3674 - DNA, 18 bp, Homo sapiens
agcccgacgcaagaggca

SEQ ID NO: 3675 - DNA, 19 bp, Homo sapiens
agcccgaggcccggccgga

SEQ ID NO: 3676 - DNA, 17 bp, Homo sapiens
agcccgcagcaaacaca

SEQ ID NO: 3677 - DNA, 19 bp, Homo sapiens
agcccgccccagccgaggt

SEQ ID NO: 3678 - DNA, 20 bp, Homo sapiens
agcccgccccagccgaggtt

SEQ ID NO: 3679 - DNA, 21 bp, Homo sapiens
agcccgccccagccgaggttc

SEQ ID NO: 3680 - DNA, 22 bp, Homo sapiens
agcccgccccagccgaggttct

SEQ ID NO: 3681 - DNA, 18 bp, Homo sapiens
agccctccggctgtgggg

SEQ ID NO: 3682 - DNA, 19 bp, Homo sapiens
agccctgcggaacctcggc

SEQ ID NO: 3683 - DNA, 18 bp, Homo sapiens
agccgaactggcagtgcc

SEQ ID NO: 3684 - DNA, 18 bp, Homo sapiens
agccgagcggccaccgag

SEQ ID NO: 3685 - DNA, 20 bp, Homo sapiens
agccgcagccgaaccgagta

SEQ ID NO: 3686 - DNA, 21 bp, Homo sapiens
agccgcccggtgctgctgagc

SEQ ID NO: 3687 - DNA, 17 bp, Homo sapiens
agccgcctgccgaactg

SEQ ID NO: 3688 - DNA, 18 bp, Homo sapiens
agccgcgaggagcgcgga

SEQ ID NO: 3689 - DNA, 22 bp, Homo sapiens
agccgcgccccaccccgccagc

SEQ ID NO: 3690 - DNA, 19 bp, Homo sapiens
agccgctgggccctgcgac

SEQ ID NO: 3691 - DNA, 22 bp, Homo sapiens
agccggaaatggttgtggacta

SEQ ID NO: 3692 - DNA, 18 bp, Homo sapiens
agccggagaagaggagtg

SEQ ID NO: 3693 - DNA, 18 bp, Homo sapiens
agccggagaagatggcgg

SEQ ID NO: 3694 - DNA, 18 bp, Homo sapiens
agccggagatggcggcgg

SEQ ID NO: 3695 - DNA, 18 bp, Homo sapiens
agccggagctggaggtgc

SEQ ID NO: 3696 - DNA, 18 bp, Homo sapiens
agccggagtagacggagc

SEQ ID NO: 3697 - DNA, 17 bp, Homo sapiens
agccggagtggagcggc

SEQ ID NO: 3698 - DNA, 20 bp, Homo sapiens
agccggagtggagcggctgc

SEQ ID NO: 3699 - DNA, 19 bp, Homo sapiens
agccggcctctggggccgg

SEQ ID NO: 3700 - DNA, 23 bp, Homo sapiens
gccccggcgcgggcgggttctgg

SEQ ID NO: 3701 - DNA, 22 bp, Homo sapiens
gcccctcgccgtaggaggaggt

SEQ ID NO: 3702 - DNA, 17 bp, Homo sapiens
gcccctgcagagatcag

SEQ ID NO: 3703 - DNA, 19 bp, Homo sapiens
gcccctgcggcgggagcga

SEQ ID NO: 3704 - DNA, 18 bp, Homo sapiens
gcccgactccgtaggagc

SEQ ID NO: 3705 - DNA, 21 bp, Homo sapiens
gcccgagaactgacagacgga

SEQ ID NO: 3706 - DNA, 19 bp, Homo sapiens
gcccgagagaagtacacac

SEQ ID NO: 3707 - DNA, 16 bp, Homo sapiens
gcccgaggacgtacgt

SEQ ID NO: 3708 - DNA, 18 bp, Homo sapiens
gcccgccatggccgagag

SEQ ID NO: 3709 - DNA, 17 bp, Homo sapiens
gcccgccgcggggcccc

SEQ ID NO: 3710 - DNA, 18 bp, Homo sapiens
gcccgcgccggcggggtc

SEQ ID NO: 3711 - DNA, 23 bp, Homo sapiens
gcccgcgccgggagcatctcgcg

SEQ ID NO: 3712 - DNA, 18 bp, Homo sapiens
gcccgcgccttagcctgt

SEQ ID NO: 3713 - DNA, 18 bp, Homo sapiens
gcccgcggagttttccgc

SEQ ID NO: 3714 - DNA, 23 bp, Homo sapiens
gcccgcggggcccatcgtcgacg

SEQ ID NO: 3715 - DNA, 19 bp, Homo sapiens
gcccgctggccgcaggggc

SEQ ID NO: 3716 - DNA, 18 bp, Homo sapiens
gcccggaagtggagcggc

SEQ ID NO: 3717 - DNA, 18 bp, Homo sapiens
gcccggaccgagaagccc

SEQ ID NO: 3718 - DNA, 19 bp, Homo sapiens
gcccggacgcggagcgaga

SEQ ID NO: 3719 - DNA, 18 bp, Homo sapiens
gcccggactgcggaagga

SEQ ID NO: 3720 - DNA, 19 bp, Homo sapiens
gcccggactgcggaaggat

SEQ ID NO: 3721 - DNA, 18 bp, Homo sapiens
gcccggagagtcgaggtg

SEQ ID NO: 3722 - DNA, 17 bp, Homo sapiens
gcccggagggacacccg

SEQ ID NO: 3723 - DNA, 17 bp, Homo sapiens
gcccggagtgtggtact

SEQ ID NO: 3724 - DNA, 19 bp, Homo sapiens
gcccggcccagatcccgca

SEQ ID NO: 3725 - DNA, 17 bp, Homo sapiens
gcccggcctgtgagcgg

SEQ ID NO: 3726 - DNA, 18 bp, Homo sapiens
gcccggcgggcgccggcg

SEQ ID NO: 3727 - DNA, 20 bp, Homo sapiens
gcccggcggtagccccggac

SEQ ID NO: 3728 - DNA, 20 bp, Homo sapiens
gcccggcgtgtagcgggcgc

SEQ ID NO: 3729 - DNA, 20 bp, Homo sapiens
gcccggctctcgaaggccgt

SEQ ID NO: 3730 - DNA, 16 bp, Homo sapiens
gcccgggaccactcca

SEQ ID NO: 3731 - DNA, 18 bp, Homo sapiens
gcccgggagatatccgcc

SEQ ID NO: 3732 - DNA, 19 bp, Homo sapiens
gcccgggagcgtgggagca

SEQ ID NO: 3733 - DNA, 22 bp, Homo sapiens
gcccgggaggatgaaccccaca

SEQ ID NO: 3734 - DNA, 17 bp, Homo sapiens
gcccgggcacccggggg

SEQ ID NO: 3735 - DNA, 21 bp, Homo sapiens
gcccgggcagggaagtcggtg

SEQ ID NO: 3736 - DNA, 20 bp, Homo sapiens
gcccgggccagaatcgaaac

SEQ ID NO: 3737 - DNA, 18 bp, Homo sapiens
gcccgggccgggggagga

SEQ ID NO: 3738 - DNA, 18 bp, Homo sapiens
gcccgggcgcccgcgggc

SEQ ID NO: 3739 - DNA, 23 bp, Homo sapiens
gcccgggctgaacggggcagcgg

SEQ ID NO: 3740 - DNA, 20 bp, Homo sapiens
gcccggggagaaagttggag

SEQ ID NO: 3741 - DNA, 18 bp, Homo sapiens
gcccggggcgggcgggta

SEQ ID NO: 3742 - DNA, 18 bp, Homo sapiens
gcccggggcgggtggacg

SEQ ID NO: 3743 - DNA, 18 bp, Homo sapiens
gcccggtctcgccggccg

SEQ ID NO: 3744 - DNA, 18 bp, Homo sapiens
gcccggtgacaggatggt

SEQ ID NO: 3745 - DNA, 19 bp, Homo sapiens
gcccgtccgcttgccacca

SEQ ID NO: 3746 - DNA, 18 bp, Homo sapiens
gcccgtcggtcgctagct

SEQ ID NO: 3747 - DNA, 22 bp, Homo sapiens
gcccgtgtcgcgccggggcacc

SEQ ID NO: 3748 - DNA, 17 bp, Homo sapiens
gccctaccgccgcacgg

SEQ ID NO: 3749 - DNA, 23 bp, Homo sapiens
gccctatggggcctcgtgcacga

SEQ ID NO: 3750 - DNA, 18 bp, Homo sapiens
gccctcaaggctctggtg

SEQ ID NO: 3751 - DNA, 21 bp, Homo sapiens
gccctcagcgcggcccccgcc

SEQ ID NO: 3752 - DNA, 18 bp, Homo sapiens
gccctcctgcacatgcgc

SEQ ID NO: 3753 - DNA, 18 bp, Homo sapiens
gccctcgcgtcggaccct

SEQ ID NO: 3754 - DNA, 18 bp, Homo sapiens
gccctcggaaagaacgga

SEQ ID NO: 3755 - DNA, 20 bp, Homo sapiens
gccctcggaaagaacggata

SEQ ID NO: 3756 - DNA, 18 bp, Homo sapiens
gccctcggactgcccgga

SEQ ID NO: 3757 - DNA, 19 bp, Homo sapiens
agccgggcagcgctcattc

SEQ ID NO: 3758 - DNA, 19 bp, Homo sapiens
agccgggcgcctcttgcaa

SEQ ID NO: 3759 - DNA, 18 bp, Homo sapiens
agccgggggacggcgaca

SEQ ID NO: 3760 - DNA, 17 bp, Homo sapiens
agccgggggcgggtttg

SEQ ID NO: 3761 - DNA, 18 bp, Homo sapiens
agccgggggcgggtttga

SEQ ID NO: 3762 - DNA, 20 bp, Homo sapiens
agccgggggctctagtgaac

SEQ ID NO: 3763 - DNA, 19 bp, Homo sapiens
agccggtcgcgggggctcc

SEQ ID NO: 3764 - DNA, 17 bp, Homo sapiens
agccggtcggaactgct

SEQ ID NO: 3765 - DNA, 22 bp, Homo sapiens
agccggtgtgcgttgctccctg

SEQ ID NO: 3766 - DNA, 17 bp, Homo sapiens
agccgttgtccttgagg

SEQ ID NO: 3767 - DNA, 20 bp, Homo sapiens
agcctcggtgccggagccgc

SEQ ID NO: 3768 - DNA, 20 bp, Homo sapiens
agcctgaggaagagggcggc

SEQ ID NO: 3769 - DNA, 24 bp, Homo sapiens
agccttagctttctcccgaacgcc

SEQ ID NO: 3770 - DNA, 18 bp, Homo sapiens
agccttccccgcgagcgg

SEQ ID NO: 3771 - DNA, 21 bp, Homo sapiens
agccttctcgtaggcgtttgc

SEQ ID NO: 3772 - DNA, 23 bp, Homo sapiens
agccttgggcgaggggtggttgc

SEQ ID NO: 3773 - DNA, 19 bp, Homo sapiens
agcgaacgagcagtgaccg

SEQ ID NO: 3774 - DNA, 18 bp, Homo sapiens
agcgaacggcgcccgcgc

SEQ ID NO: 3775 - DNA, 17 bp, Homo sapiens
agcgaagagaaccggtc

SEQ ID NO: 3776 - DNA, 18 bp, Homo sapiens
agcgaaggagcgaaggag

SEQ ID NO: 3777 - DNA, 19 bp, Homo sapiens
agcgaaggaggagtgtgtg

SEQ ID NO: 3778 - DNA, 18 bp, Homo sapiens
agcgaagggcaccatctt

SEQ ID NO: 3779 - DNA, 18 bp, Homo sapiens
agcgaatgggttggggtg

SEQ ID NO: 3780 - DNA, 22 bp, Homo sapiens
agcgacacacgctctcgccgcc

SEQ ID NO: 3781 - DNA, 21 bp, Homo sapiens
agcgacacttgttcgttcaac

SEQ ID NO: 3782 - DNA, 18 bp, Homo sapiens
agcgaccccagcagcgct

SEQ ID NO: 3783 - DNA, 16 bp, Homo sapiens
agcgacgaggaggacc

SEQ ID NO: 3784 - DNA, 18 bp, Homo sapiens
agcgactacgagggatgg

SEQ ID NO: 3785 - DNA, 22 bp, Homo sapiens
agcgactagacgaacagtccgg

SEQ ID NO: 3786 - DNA, 17 bp, Homo sapiens
agcgactgagtcgtccg

SEQ ID NO: 3787 - DNA, 17 bp, Homo sapiens
agcgactgccggaagtg

SEQ ID NO: 3788 - DNA, 16 bp, Homo sapiens
agcgagaaggaacccc

SEQ ID NO: 3789 - DNA, 17 bp, Homo sapiens
agcgagagaaggggaaa

SEQ ID NO: 3790 - DNA, 19 bp, Homo sapiens
agcgagagaaggggaaaga

SEQ ID NO: 3791 - DNA, 17 bp, Homo sapiens
agcgagagactgggccg

SEQ ID NO: 3792 - DNA, 18 bp, Homo sapiens
agcgagcagcgagctggc

SEQ ID NO: 3793 - DNA, 21 bp, Homo sapiens
agcgagcaggacagaggagcc

SEQ ID NO: 3794 - DNA, 17 bp, Homo sapiens
agcgagccggctagagg

SEQ ID NO: 3795 - DNA, 17 bp, Homo sapiens
agcgagctggagagagg

SEQ ID NO: 3796 - DNA, 18 bp, Homo sapiens
agcgagctggagagagga

SEQ ID NO: 3797 - DNA, 19 bp, Homo sapiens
agcgagctggagagaggac

SEQ ID NO: 3798 - DNA, 21 bp, Homo sapiens
agcgagctggagagaggactg

SEQ ID NO: 3799 - DNA, 22 bp, Homo sapiens
agcgaggacacgacacatgcag

SEQ ID NO: 3800 - DNA, 18 bp, Homo sapiens
agcgaggccgaggcccct

SEQ ID NO: 3801 - DNA, 18 bp, Homo sapiens
agcgaggctggcgcagcg

SEQ ID NO: 3802 - DNA, 18 bp, Homo sapiens
agcgagggaggggagcgc

SEQ ID NO: 3803 - DNA, 22 bp, Homo sapiens
agcgagggctgagccgggcggt

SEQ ID NO: 3804 - DNA, 20 bp, Homo sapiens
agcgaggtgacagcctcgct

SEQ ID NO: 3805 - DNA, 21 bp, Homo sapiens
agcgagtcgcgtagctgagcc

SEQ ID NO: 3806 - DNA, 18 bp, Homo sapiens
agcgagtggacgtgactg

SEQ ID NO: 3807 - DNA, 19 bp, Homo sapiens
agcgagtgtcatggcggcc

SEQ ID NO: 3808 - DNA, 20 bp, Homo sapiens
agcgatcagtcggtcctggg

SEQ ID NO: 3809 - DNA, 17 bp, Homo sapiens
agcgatcgagggagctg

SEQ ID NO: 3810 - DNA, 21 bp, Homo sapiens
agcgatctgggcaacggctgc

SEQ ID NO: 3811 - DNA, 20 bp, Homo sapiens
agcgatgagtgagaacgccg

SEQ ID NO: 3812 - DNA, 20 bp, Homo sapiens
agcgcaccgcgggaagatgg

SEQ ID NO: 3813 - DNA, 18 bp, Homo sapiens
agcgcacggacagagcgg

SEQ ID NO: 3814 - DNA, 18 bp, Homo sapiens
gccctctgtcccagggaa

SEQ ID NO: 3815 - DNA, 18 bp, Homo sapiens
gccctcttgtttttagtc

SEQ ID NO: 3816 - DNA, 20 bp, Homo sapiens
gccctcttttccgtggcgcc

SEQ ID NO: 3817 - DNA, 16 bp, Homo sapiens
gccctgagacggtgcg

SEQ ID NO: 3818 - DNA, 20 bp, Homo sapiens
gccctgcaatgtcaagggag

SEQ ID NO: 3819 - DNA, 18 bp, Homo sapiens
gccctgccagacccgccc

SEQ ID NO: 3820 - DNA, 18 bp, Homo sapiens
gccctgcgggttctcaga

SEQ ID NO: 3821 - DNA, 21 bp, Homo sapiens
gccctggcagagctcgccact

SEQ ID NO: 3822 - DNA, 18 bp, Homo sapiens
gccctggccgtgagcccc

SEQ ID NO: 3823 - DNA, 22 bp, Homo sapiens
gccctggcggagcagagacagg

SEQ ID NO: 3824 - DNA, 22 bp, Homo sapiens
gccctggcggcggatctggacg

SEQ ID NO: 3825 - DNA, 17 bp, Homo sapiens
gccctgggcagcagcgg

SEQ ID NO: 3826 - DNA, 20 bp, Homo sapiens
gccctggggctcctgggcgc

SEQ ID NO: 3827 - DNA, 18 bp, Homo sapiens
gccctggggggcaaagag

SEQ ID NO: 3828 - DNA, 18 bp, Homo sapiens
gccctgtgacacgtagca

SEQ ID NO: 3829 - DNA, 20 bp, Homo sapiens
gcccttagttgactgggacc

SEQ ID NO: 3830 - DNA, 19 bp, Homo sapiens
gccgaaactgcgcggaggc

SEQ ID NO: 3831 - DNA, 17 bp, Homo sapiens
gccgaacctgtgcgcgg

SEQ ID NO: 3832 - DNA, 18 bp, Homo sapiens
gccgaagagtgtggtagg

SEQ ID NO: 3833 - DNA, 19 bp, Homo sapiens
gccgaagagtgtggtaggt

SEQ ID NO: 3834 - DNA, 20 bp, Homo sapiens
gccgaagcaagtagcgccaa

SEQ ID NO: 3835 - DNA, 17 bp, Homo sapiens
gccgaagcgtcggacta

SEQ ID NO: 3836 - DNA, 18 bp, Homo sapiens
gccgaagcgtcggactac

SEQ ID NO: 3837 - DNA, 19 bp, Homo sapiens
gccgaagcgtcggactacc

SEQ ID NO: 3838 - DNA, 20 bp, Homo sapiens
gccgaagcgtcggactaccg

SEQ ID NO: 3839 - DNA, 21 bp, Homo sapiens
gccgaagcgtcggactaccgt

SEQ ID NO: 3840 - DNA, 22 bp, Homo sapiens
gccgaagcgtcggactaccgtt

SEQ ID NO: 3841 - DNA, 24 bp, Homo sapiens
gccgaagcgtcggactaccgttgg

SEQ ID NO: 3842 - DNA, 18 bp, Homo sapiens
gccgaagggacgcaccac

SEQ ID NO: 3843 - DNA, 17 bp, Homo sapiens
gccgaagggcgtcggaa

SEQ ID NO: 3844 - DNA, 17 bp, Homo sapiens
gccgaagtcggcgagga

SEQ ID NO: 3845 - DNA, 20 bp, Homo sapiens
gccgaagtcggcgaggacag

SEQ ID NO: 3846 - DNA, 19 bp, Homo sapiens
gccgaagtggctggctcat

SEQ ID NO: 3847 - DNA, 21 bp, Homo sapiens
gccgaagtgggcgtgcggctc

SEQ ID NO: 3848 - DNA, 17 bp, Homo sapiens
gccgacaggatgggtga

SEQ ID NO: 3849 - DNA, 17 bp, Homo sapiens
gccgacaggccagagtt

SEQ ID NO: 3850 - DNA, 20 bp, Homo sapiens
gccgaccagaatccgtgaac

SEQ ID NO: 3851 - DNA, 18 bp, Homo sapiens
gccgacgcagatgaatgg

SEQ ID NO: 3852 - DNA, 16 bp, Homo sapiens
gccgacgcagcggtgt

SEQ ID NO: 3853 - DNA, 18 bp, Homo sapiens
gccgacgcgggcggaccg

SEQ ID NO: 3854 - DNA, 22 bp, Homo sapiens
gccgacggagcgagcgggcgtg

SEQ ID NO: 3855 - DNA, 22 bp, Homo sapiens
gccgacggccattttgtgaagc

SEQ ID NO: 3856 - DNA, 23 bp, Homo sapiens
gccgacggcggccgagacggaca

SEQ ID NO: 3857 - DNA, 24 bp, Homo sapiens
gccgacggcggccgagacggacat

SEQ ID NO: 3858 - DNA, 18 bp, Homo sapiens
gccgacgggggcgggctg

SEQ ID NO: 3859 - DNA, 18 bp, Homo sapiens
gccgactacagagaaggg

SEQ ID NO: 3860 - DNA, 20 bp, Homo sapiens
gccgactggagagggatggg

SEQ ID NO: 3861 - DNA, 17 bp, Homo sapiens
gccgactgtgtagtccg

SEQ ID NO: 3862 - DNA, 18 bp, Homo sapiens
gccgactgtgtagtccgc

SEQ ID NO: 3863 - DNA, 16 bp, Homo sapiens
gccgagaagactcccg

SEQ ID NO: 3864 - DNA, 17 bp, Homo sapiens
gccgagaggagaggaca

SEQ ID NO: 3865 - DNA, 18 bp, Homo sapiens
gccgagaggagaggacag

SEQ ID NO: 3866 - DNA, 22 bp, Homo sapiens
gccgagaggagaggacagctgg

SEQ ID NO: 3867 - DNA, 18 bp, Homo sapiens
gccgagaggaggagaacg

SEQ ID NO: 3868 - DNA, 20 bp, Homo sapiens
gccgagaggctggagctgcg

SEQ ID NO: 3869 - DNA, 20 bp, Homo sapiens
gccgagatggcttcggcggg

SEQ ID NO: 3870 - DNA, 21 bp, Homo sapiens
gccgagcccagctacgcgacg

SEQ ID NO: 3871 - DNA, 22 bp, Homo sapiens
agcgcagcgggattctcacacc

SEQ ID NO: 3872 - DNA, 19 bp, Homo sapiens
agcgcaggtaagggcgccc

SEQ ID NO: 3873 - DNA, 18 bp, Homo sapiens
agcgccaaactcaaactt

SEQ ID NO: 3874 - DNA, 20 bp, Homo sapiens
agcgccaccgcaaagttctg

SEQ ID NO: 3875 - DNA, 18 bp, Homo sapiens
agcgccagtcctcggctg

SEQ ID NO: 3876 - DNA, 18 bp, Homo sapiens
agcgcccagcggagcgac

SEQ ID NO: 3877 - DNA, 21 bp, Homo sapiens
agcgccccggcggagctggcc

SEQ ID NO: 3878 - DNA, 17 bp, Homo sapiens
agcgcccgcgatggtga

SEQ ID NO: 3879 - DNA, 20 bp, Homo sapiens
agcgccctaccgctttcgct

SEQ ID NO: 3880 - DNA, 17 bp, Homo sapiens
agcgccgagagcgcggc

SEQ ID NO: 3881 - DNA, 18 bp, Homo sapiens
agcgccgcctgggagtga

SEQ ID NO: 3882 - DNA, 20 bp, Homo sapiens
agcgccgcggccccgagatg

SEQ ID NO: 3883 - DNA, 21 bp, Homo sapiens
agcgcctggggaccgcagagg

SEQ ID NO: 3884 - DNA, 18 bp, Homo sapiens
agcgcgcagaacttgggg

SEQ ID NO: 3885 - DNA, 20 bp, Homo sapiens
agcgcgcagaacttggggag

SEQ ID NO: 3886 - DNA, 23 bp, Homo sapiens
agcgcgcagaacttggggagccg

SEQ ID NO: 3887 - DNA, 21 bp, Homo sapiens
agcgcgcaggcgcagtctccc

SEQ ID NO: 3888 - DNA, 22 bp, Homo sapiens
agcgcgcgggctgcgggcggct

SEQ ID NO: 3889 - DNA, 18 bp, Homo sapiens
agcgcggaactggggttg

SEQ ID NO: 3890 - DNA, 18 bp, Homo sapiens
agcgcggacggatgctta

SEQ ID NO: 3891 - DNA, 18 bp, Homo sapiens
agcgcggcagtgggcgcc

SEQ ID NO: 3892 - DNA, 22 bp, Homo sapiens
agcgcggcgcccggaccgcggt

SEQ ID NO: 3893 - DNA, 18 bp, Homo sapiens
agcgcggctgcagcaggg

SEQ ID NO: 3894 - DNA, 20 bp, Homo sapiens
agcgcggctgcagcagggcg

SEQ ID NO: 3895 - DNA, 18 bp, Homo sapiens
agcgcggggccgcggcgg

SEQ ID NO: 3896 - DNA, 18 bp, Homo sapiens
agcgcggtcgaggctttc

SEQ ID NO: 3897 - DNA, 18 bp, Homo sapiens
agcgcgttgtacccgagg

SEQ ID NO: 3898 - DNA, 19 bp, Homo sapiens
agcgctacgcggccgcctt

SEQ ID NO: 3899 - DNA, 21 bp, Homo sapiens
agcgctcaggaaggtgcgggc

SEQ ID NO: 3900 - DNA, 17 bp, Homo sapiens
agcgctcccactctcgg

SEQ ID NO: 3901 - DNA, 18 bp, Homo sapiens
agcgctgagggagctcgg

SEQ ID NO: 3902 - DNA, 19 bp, Homo sapiens
agcgctgaggttcaggcgc

SEQ ID NO: 3903 - DNA, 18 bp, Homo sapiens
agcgctgcaagaggccta

SEQ ID NO: 3904 - DNA, 18 bp, Homo sapiens
agcgctgcggagggtgcg

SEQ ID NO: 3905 - DNA, 18 bp, Homo sapiens
agcgcttcagtagcgaga

SEQ ID NO: 3906 - DNA, 19 bp, Homo sapiens
agcgcttcagtagcgagag

SEQ ID NO: 3907 - DNA, 19 bp, Homo sapiens
agcgcttcctttttgtccg

SEQ ID NO: 3908 - DNA, 17 bp, Homo sapiens
agcggaacccagagaag

SEQ ID NO: 3909 - DNA, 17 bp, Homo sapiens
agcggaacttcctgagg

SEQ ID NO: 3910 - DNA, 24 bp, Homo sapiens
agcggaagccaggaggtattgctg

SEQ ID NO: 3911 - DNA, 17 bp, Homo sapiens
agcggaagcggaaggtt

SEQ ID NO: 3912 - DNA, 18 bp, Homo sapiens
agcggaagtcactccctg

SEQ ID NO: 3913 - DNA, 20 bp, Homo sapiens
agcggacctggcggccgggc

SEQ ID NO: 3914 - DNA, 18 bp, Homo sapiens
agcggacggcaaagaacg

SEQ ID NO: 3915 - DNA, 15 bp, Homo sapiens
agcggacgggcggac

SEQ ID NO: 3916 - DNA, 18 bp, Homo sapiens
agcggacggtccggcttc

SEQ ID NO: 3917 - DNA, 19 bp, Homo sapiens
agcggacggtccggcttcc

SEQ ID NO: 3918 - DNA, 18 bp, Homo sapiens
agcggacggtccttgcat

SEQ ID NO: 3919 - DNA, 17 bp, Homo sapiens
agcggactaataaaggc

SEQ ID NO: 3920 - DNA, 17 bp, Homo sapiens
agcggactgctagaggc

SEQ ID NO: 3921 - DNA, 19 bp, Homo sapiens
agcggagacctcccttcaa

SEQ ID NO: 3922 - DNA, 20 bp, Homo sapiens
agcggagagcgacgcggttg

SEQ ID NO: 3923 - DNA, 21 bp, Homo sapiens
agcggagccggaagtgaggca

SEQ ID NO: 3924 - DNA, 20 bp, Homo sapiens
agcggagcctggagagaagg

SEQ ID NO: 3925 - DNA, 21 bp, Homo sapiens
agcggagcggctgcagcctgc

SEQ ID NO: 3926 - DNA, 18 bp, Homo sapiens
agcggaggcggagactag

SEQ ID NO: 3927 - DNA, 18 bp, Homo sapiens
agcggaggtgggaggcga

SEQ ID NO: 3928 - DNA, 18 bp, Homo sapiens
gccgagccccgtgcactg

SEQ ID NO: 3929 - DNA, 18 bp, Homo sapiens
gccgagcccggtgccaag

SEQ ID NO: 3930 - DNA, 19 bp, Homo sapiens
gccgagcccggtgccaagc

SEQ ID NO: 3931 - DNA, 18 bp, Homo sapiens
gccgagccggtaagaggg

SEQ ID NO: 3932 - DNA, 18 bp, Homo sapiens
gccgagcgaatctcggag

SEQ ID NO: 3933 - DNA, 18 bp, Homo sapiens
gccgagcgcctgacccgg

SEQ ID NO: 3934 - DNA, 19 bp, Homo sapiens
gccgagcggaactggctgg

SEQ ID NO: 3935 - DNA, 23 bp, Homo sapiens
gccgagcggacaggaacgcagca

SEQ ID NO: 3936 - DNA, 17 bp, Homo sapiens
gccgagcggcgggcgac

SEQ ID NO: 3937 - DNA, 23 bp, Homo sapiens
gccgagctgcagggaccgcacgg

SEQ ID NO: 3938 - DNA, 18 bp, Homo sapiens
gccgaggaggacacggag

SEQ ID NO: 3939 - DNA, 19 bp, Homo sapiens
gccgaggagggagggctgc

SEQ ID NO: 3940 - DNA, 18 bp, Homo sapiens
gccgaggcggacggaccg

SEQ ID NO: 3941 - DNA, 18 bp, Homo sapiens
gccgaggcggccgactcg

SEQ ID NO: 3942 - DNA, 17 bp, Homo sapiens
gccgaggcggctagagc

SEQ ID NO: 3943 - DNA, 18 bp, Homo sapiens
gccgaggcggctagagcg

SEQ ID NO: 3944 - DNA, 18 bp, Homo sapiens
gccgaggctgaaggaaga

SEQ ID NO: 3945 - DNA, 20 bp, Homo sapiens
gccgagggcgggggagagcg

SEQ ID NO: 3946 - DNA, 18 bp, Homo sapiens
gccgaggggctgcgagag

SEQ ID NO: 3947 - DNA, 17 bp, Homo sapiens
gccgagggtcgtcaagc

SEQ ID NO: 3948 - DNA, 19 bp, Homo sapiens
gccgagtagtggcaacggc

SEQ ID NO: 3949 - DNA, 16 bp, Homo sapiens
gccgagtcgaacgggg

SEQ ID NO: 3950 - DNA, 17 bp, Homo sapiens
gccgagtcgaacgggga

SEQ ID NO: 3951 - DNA, 16 bp, Homo sapiens
gccgagtcggagaccg

SEQ ID NO: 3952 - DNA, 18 bp, Homo sapiens
gccgagtcggagaccgtg

SEQ ID NO: 3953 - DNA, 18 bp, Homo sapiens
gccgagtgacagagacgc

SEQ ID NO: 3954 - DNA, 17 bp, Homo sapiens
gccgagtgggcgctcag

SEQ ID NO: 3955 - DNA, 18 bp, Homo sapiens
gccgagttccagcagtcc

SEQ ID NO: 3956 - DNA, 21 bp, Homo sapiens
gccgatagtggtgacggcggc

SEQ ID NO: 3957 - DNA, 17 bp, Homo sapiens
gccgatcagcggaagac

SEQ ID NO: 3958 - DNA, 19 bp, Homo sapiens
gccgatcaggagtctgcaa

SEQ ID NO: 3959 - DNA, 18 bp, Homo sapiens
gccgatgatctggagcag

SEQ ID NO: 3960 - DNA, 19 bp, Homo sapiens
gccgatgatctggagcagc

SEQ ID NO: 3961 - DNA, 18 bp, Homo sapiens
gccgatgcgcactgtggc

SEQ ID NO: 3962 - DNA, 18 bp, Homo sapiens
gccgatgcggggctgtgc

SEQ ID NO: 3963 - DNA, 18 bp, Homo sapiens
gccgatggcggagggaac

SEQ ID NO: 3964 - DNA, 19 bp, Homo sapiens
gccgatggcgtttctgagg

SEQ ID NO: 3965 - DNA, 20 bp, Homo sapiens
gccgcaaagtttggctgtgg

SEQ ID NO: 3966 - DNA, 17 bp, Homo sapiens
gccgcaacaggcagcgg

SEQ ID NO: 3967 - DNA, 19 bp, Homo sapiens
gccgcaaggtgcgcagtag

SEQ ID NO: 3968 - DNA, 18 bp, Homo sapiens
gccgcaatggacaagctg

SEQ ID NO: 3969 - DNA, 18 bp, Homo sapiens
gccgcacacaagctggct

SEQ ID NO: 3970 - DNA, 22 bp, Homo sapiens
gccgcacaggctaagatggcgg

SEQ ID NO: 3971 - DNA, 18 bp, Homo sapiens
gccgcaccgcctaaatac

SEQ ID NO: 3972 - DNA, 17 bp, Homo sapiens
gccgcacggaacggcgg

SEQ ID NO: 3973 - DNA, 18 bp, Homo sapiens
gccgcagacgccgccgcg

SEQ ID NO: 3974 - DNA, 19 bp, Homo sapiens
gccgcagaggcttgggctg

SEQ ID NO: 3975 - DNA, 19 bp, Homo sapiens
gccgcagcagcggacggca

SEQ ID NO: 3976 - DNA, 16 bp, Homo sapiens
gccgcaggagctccgg

SEQ ID NO: 3977 - DNA, 22 bp, Homo sapiens
gccgcaggaggagagagaaacg

SEQ ID NO: 3978 - DNA, 19 bp, Homo sapiens
gccgcaggcatggcggcgg

SEQ ID NO: 3979 - DNA, 19 bp, Homo sapiens
gccgcaggtagatcgctcc

SEQ ID NO: 3980 - DNA, 21 bp, Homo sapiens
gccgcaggtggcgacggtggc

SEQ ID NO: 3981 - DNA, 18 bp, Homo sapiens
gccgcagtagacggatcc

SEQ ID NO: 3982 - DNA, 20 bp, Homo sapiens
gccgcagtcggcaaggagag

SEQ ID NO: 3983 - DNA, 23 bp, Homo sapiens
gccgcagtcggcaaggagagacg

SEQ ID NO: 3984 - DNA, 18 bp, Homo sapiens
gccgccaagatgatgtgc

SEQ ID NO: 3985 - DNA, 18 bp, Homo sapiens
agcggagtggccttgcca

SEQ ID NO: 3986 - DNA, 19 bp, Homo sapiens
agcggagttaaccgaagag

SEQ ID NO: 3987 - DNA, 17 bp, Homo sapiens
agcggagtttgcgtgtg

SEQ ID NO: 3988 - DNA, 18 bp, Homo sapiens
agcggatagaggacacga

SEQ ID NO: 3989 - DNA, 16 bp, Homo sapiens
agcggatcttgcagga

SEQ ID NO: 3990 - DNA, 21 bp, Homo sapiens
agcggatggcagaggaaggag

SEQ ID NO: 3991 - DNA, 18 bp, Homo sapiens
agcggatgtcatattgta

SEQ ID NO: 3992 - DNA, 22 bp, Homo sapiens
agcggcacgtgggcctcgcagg

SEQ ID NO: 3993 - DNA, 17 bp, Homo sapiens
agcggcactcaagatgg

SEQ ID NO: 3994 - DNA, 17 bp, Homo sapiens
agcggcagagcggagcg

SEQ ID NO: 3995 - DNA, 18 bp, Homo sapiens
agcggcagcagaggcagc

SEQ ID NO: 3996 - DNA, 16 bp, Homo sapiens
agcggcagccggatcg

SEQ ID NO: 3997 - DNA, 18 bp, Homo sapiens
agcggcaggacgcacttg

SEQ ID NO: 3998 - DNA, 18 bp, Homo sapiens
agcggcaggtagaagggg

SEQ ID NO: 3999 - DNA, 17 bp, Homo sapiens
agcggcagtggaaccga

SEQ ID NO: 4000 - DNA, 18 bp, Homo sapiens
agcggcagtggaaccgac

SEQ ID NO: 4001 - DNA, 18 bp, Homo sapiens
agcggccaggaacgccag

SEQ ID NO: 4002 - DNA, 15 bp, Homo sapiens
agcggcccccggcgt

SEQ ID NO: 4003 - DNA, 17 bp, Homo sapiens
agcggccgggctggcta

SEQ ID NO: 4004 - DNA, 19 bp, Homo sapiens
agcggccggtttctgcgtc

SEQ ID NO: 4005 - DNA, 16 bp, Homo sapiens
agcggcctcctggaga

SEQ ID NO: 4006 - DNA, 20 bp, Homo sapiens
agcggcctgcggggcagagg

SEQ ID NO: 4007 - DNA, 18 bp, Homo sapiens
agcggcgacagtaagtgc

SEQ ID NO: 4008 - DNA, 18 bp, Homo sapiens
agcggcgagtggctccgt

SEQ ID NO: 4009 - DNA, 22 bp, Homo sapiens
agcggcgcaccgttaagatggc

SEQ ID NO: 4010 - DNA, 16 bp, Homo sapiens
agcggcgcccgggcca

SEQ ID NO: 4011 - DNA, 17 bp, Homo sapiens
agcggcgcccgggccag

SEQ ID NO: 4012 - DNA, 16 bp, Homo sapiens
agcggcgcggagactg

SEQ ID NO: 4013 - DNA, 17 bp, Homo sapiens
agcggcggaggagcgga

SEQ ID NO: 4014 - DNA, 19 bp, Homo sapiens
agcggcggcagctgcgagg

SEQ ID NO: 4015 - DNA, 18 bp, Homo sapiens
agcggcggcagcttcgcg

SEQ ID NO: 4016 - DNA, 21 bp, Homo sapiens
agcggcggcggcggtggccgc

SEQ ID NO: 4017 - DNA, 18 bp, Homo sapiens
agcggcggcggctgttgc

SEQ ID NO: 4018 - DNA, 19 bp, Homo sapiens
agcggcggcgggaaatcgg

SEQ ID NO: 4019 - DNA, 18 bp, Homo sapiens
agcggcgggagcgaggtg

SEQ ID NO: 4020 - DNA, 18 bp, Homo sapiens
agcggcggtagcagtggc

SEQ ID NO: 4021 - DNA, 20 bp, Homo sapiens
agcggcgtccgaggcaacaa

SEQ ID NO: 4022 - DNA, 22 bp, Homo sapiens
agcggctcggcccggcagtagt

SEQ ID NO: 4023 - DNA, 16 bp, Homo sapiens
agcggctcgtgcggca

SEQ ID NO: 4024 - DNA, 18 bp, Homo sapiens
agcggctctgggtctagg

SEQ ID NO: 4025 - DNA, 18 bp, Homo sapiens
agcggctgcggggaaagt

SEQ ID NO: 4026 - DNA, 18 bp, Homo sapiens
agcggctggagcggggta

SEQ ID NO: 4027 - DNA, 20 bp, Homo sapiens
agcggcttcggagacccggg

SEQ ID NO: 4028 - DNA, 18 bp, Homo sapiens
agcgggaagactcatcgg

SEQ ID NO: 4029 - DNA, 17 bp, Homo sapiens
agcgggaaggtaggtaa

SEQ ID NO: 4030 - DNA, 21 bp, Homo sapiens
agcgggaaggtaggtaacggc

SEQ ID NO: 4031 - DNA, 19 bp, Homo sapiens
agcgggacagggacaagcg

SEQ ID NO: 4032 - DNA, 18 bp, Homo sapiens
agcgggactgcgggggtg

SEQ ID NO: 4033 - DNA, 18 bp, Homo sapiens
agcgggagaacgataatg

SEQ ID NO: 4034 - DNA, 19 bp, Homo sapiens
agcgggagaacgataatgc

SEQ ID NO: 4035 - DNA, 20 bp, Homo sapiens
agcgggagccgtgcggctgg

SEQ ID NO: 4036 - DNA, 18 bp, Homo sapiens
agcgggagctgaccaggc

SEQ ID NO: 4037 - DNA, 20 bp, Homo sapiens
agcgggagtttgaggaccgg

SEQ ID NO: 4038 - DNA, 17 bp, Homo sapiens
agcgggcaaggtcagct

SEQ ID NO: 4039 - DNA, 18 bp, Homo sapiens
agcgggcaaggtcagctg

SEQ ID NO: 4040 - DNA, 16 bp, Homo sapiens
agcgggccgggaaaag

SEQ ID NO: 4041 - DNA, 19 bp, Homo sapiens
agcgggccttcggggccgg

SEQ ID NO: 4042 - DNA, 17 bp, Homo sapiens
gccgccaaggtgctcgg

SEQ ID NO: 4043 - DNA, 21 bp, Homo sapiens
gccgccacatcctctgaggta

SEQ ID NO: 4044 - DNA, 21 bp, Homo sapiens
gccgccaccggcaaggggtgc

SEQ ID NO: 4045 - DNA, 19 bp, Homo sapiens
gccgccactggaaccagga

SEQ ID NO: 4046 - DNA, 15 bp, Homo sapiens
gccgccatcccctca

SEQ ID NO: 4047 - DNA, 18 bp, Homo sapiens
gccgccatcttagatggc

SEQ ID NO: 4048 - DNA, 18 bp, Homo sapiens
gccgccatctttccgtcc

SEQ ID NO: 4049 - DNA, 20 bp, Homo sapiens
gccgccatgagcgccgcgct

SEQ ID NO: 4050 - DNA, 18 bp, Homo sapiens
gccgccatggagcagcgc

SEQ ID NO: 4051 - DNA, 22 bp, Homo sapiens
gccgccatttcgggcgctgctg

SEQ ID NO: 4052 - DNA, 24 bp, Homo sapiens
gccgccattttggagcgatcggag

SEQ ID NO: 4053 - DNA, 20 bp, Homo sapiens
gccgccattttgtgcagtcg

SEQ ID NO: 4054 - DNA, 18 bp, Homo sapiens
gccgcccccaccgccgcc

SEQ ID NO: 4055 - DNA, 19 bp, Homo sapiens
gccgccccgggaacaagga

SEQ ID NO: 4056 - DNA, 20 bp, Homo sapiens
gccgcccctgttgggggtga

SEQ ID NO: 4057 - DNA, 19 bp, Homo sapiens
gccgccccttccgaggcta

SEQ ID NO: 4058 - DNA, 22 bp, Homo sapiens
gccgcccgcgaccgcgagccgg

SEQ ID NO: 4059 - DNA, 19 bp, Homo sapiens
gccgcccgtcgcggactcg

SEQ ID NO: 4060 - DNA, 18 bp, Homo sapiens
gccgccctgagacggtgc

SEQ ID NO: 4061 - DNA, 16 bp, Homo sapiens
gccgccgagagcctta

SEQ ID NO: 4062 - DNA, 19 bp, Homo sapiens
gccgccgagttggaggcgg

SEQ ID NO: 4063 - DNA, 17 bp, Homo sapiens
gccgccgccccccccac

SEQ ID NO: 4064 - DNA, 19 bp, Homo sapiens
gccgccgccgccagatcgg

SEQ ID NO: 4065 - DNA, 19 bp, Homo sapiens
gccgccgcgccggggcgga

SEQ ID NO: 4066 - DNA, 17 bp, Homo sapiens
gccgccgcggcagcgcg

SEQ ID NO: 4067 - DNA, 18 bp, Homo sapiens
gccgccgcggtcgctcta

SEQ ID NO: 4068 - DNA, 17 bp, Homo sapiens
gccgccgctccggaccc

SEQ ID NO: 4069 - DNA, 19 bp, Homo sapiens
gccgccgctcttcagtttg

SEQ ID NO: 4070 - DNA, 19 bp, Homo sapiens
gccgccgctgcccgcggct

SEQ ID NO: 4071 - DNA, 23 bp, Homo sapiens
gccgccgctggcgcatggcgggg

SEQ ID NO: 4072 - DNA, 17 bp, Homo sapiens
gccgccgggactcttgg

SEQ ID NO: 4073 - DNA, 21 bp, Homo sapiens
gccgccgggagcggatggcgg

SEQ ID NO: 4074 - DNA, 18 bp, Homo sapiens
gccgccgggctagggcga

SEQ ID NO: 4075 - DNA, 21 bp, Homo sapiens
gccgcctctgaggccagggca

SEQ ID NO: 4076 - DNA, 18 bp, Homo sapiens
gccgcctggggggagcgc

SEQ ID NO: 4077 - DNA, 18 bp, Homo sapiens
gccgcctggtgtggtggt

SEQ ID NO: 4078 - DNA, 21 bp, Homo sapiens
gccgcctggtgtggtggttag

SEQ ID NO: 4079 - DNA, 18 bp, Homo sapiens
gccgcctgtcgccgcggg

SEQ ID NO: 4080 - DNA, 23 bp, Homo sapiens
gccgcgaaaggagggagcagctt

SEQ ID NO: 4081 - DNA, 19 bp, Homo sapiens
gccgcgaagttggagaggg

SEQ ID NO: 4082 - DNA, 21 bp, Homo sapiens
gccgcgaagttggagagggtt

SEQ ID NO: 4083 - DNA, 22 bp, Homo sapiens
gccgcgactgcgcagggcgggg

SEQ ID NO: 4084 - DNA, 18 bp, Homo sapiens
gccgcgagctgacccgct

SEQ ID NO: 4085 - DNA, 20 bp, Homo sapiens
gccgcgaggacgggcagggc

SEQ ID NO: 4086 - DNA, 17 bp, Homo sapiens
gccgcgagtccgcagta

SEQ ID NO: 4087 - DNA, 18 bp, Homo sapiens
gccgcgagtccgcagtag

SEQ ID NO: 4088 - DNA, 20 bp, Homo sapiens
gccgcgatgggggaagacga

SEQ ID NO: 4089 - DNA, 22 bp, Homo sapiens
gccgcgcagcggacaccgtgcg

SEQ ID NO: 4090 - DNA, 18 bp, Homo sapiens
gccgcgcagtcggaccgg

SEQ ID NO: 4091 - DNA, 17 bp, Homo sapiens
gccgcgccgagcgaatc

SEQ ID NO: 4092 - DNA, 18 bp, Homo sapiens
gccgcgccggactgaggc

SEQ ID NO: 4093 - DNA, 16 bp, Homo sapiens
gccgcgccgggagcgc

SEQ ID NO: 4094 - DNA, 21 bp, Homo sapiens
gccgcgccgggccgcgctgcc

SEQ ID NO: 4095 - DNA, 19 bp, Homo sapiens
gccgcgcgcgcaggtacgg

SEQ ID NO: 4096 - DNA, 16 bp, Homo sapiens
gccgcgcggggcagtg

SEQ ID NO: 4097 - DNA, 16 bp, Homo sapiens
gccgcgcgtcatggcc

SEQ ID NO: 4098 - DNA, 16 bp, Homo sapiens
gccgcgcgtctttaaa

SEQ ID NO: 4099 - DNA, 20 bp, Homo sapiens
agcgggcggaggaggaagtg

SEQ ID NO: 4100 - DNA, 18 bp, Homo sapiens
agcgggcggcggagcctg

SEQ ID NO: 4101 - DNA, 18 bp, Homo sapiens
agcgggcggcggcgcggc

SEQ ID NO: 4102 - DNA, 18 bp, Homo sapiens
agcgggcggctgtggcct

SEQ ID NO: 4103 - DNA, 18 bp, Homo sapiens
agcggggacgccgacctg

SEQ ID NO: 4104 - DNA, 20 bp, Homo sapiens
agcggggcgggaacgcggag

SEQ ID NO: 4105 - DNA, 18 bp, Homo sapiens
agcggggctgtagccggg

SEQ ID NO: 4106 - DNA, 20 bp, Homo sapiens
agcggggctgtagccgggcg

SEQ ID NO: 4107 - DNA, 18 bp, Homo sapiens
agcggggctgtctatccc

SEQ ID NO: 4108 - DNA, 18 bp, Homo sapiens
agcggggtggacaagtgg

SEQ ID NO: 4109 - DNA, 20 bp, Homo sapiens
agcggggtggacaagtggcg

SEQ ID NO: 4110 - DNA, 16 bp, Homo sapiens
agcggggttcgggatg

SEQ ID NO: 4111 - DNA, 22 bp, Homo sapiens
agcgggtatattagatccgtgg

SEQ ID NO: 4112 - DNA, 18 bp, Homo sapiens
agcggtccggacgccgcc

SEQ ID NO: 4113 - DNA, 18 bp, Homo sapiens
agcggtcgttgccatgga

SEQ ID NO: 4114 - DNA, 17 bp, Homo sapiens
agcggtctaggcgagga

SEQ ID NO: 4115 - DNA, 18 bp, Homo sapiens
agcggtctaggcgaggac

SEQ ID NO: 4116 - DNA, 18 bp, Homo sapiens
agcggtgaggaccgcggc

SEQ ID NO: 4117 - DNA, 17 bp, Homo sapiens
agcggtgcgctccgtca

SEQ ID NO: 4118 - DNA, 16 bp, Homo sapiens
agcggtgcttctagga

SEQ ID NO: 4119 - DNA, 18 bp, Homo sapiens
agcggtggatcactcggc

SEQ ID NO: 4120 - DNA, 21 bp, Homo sapiens
agcggtggcagcggcagcgga

SEQ ID NO: 4121 - DNA, 24 bp, Homo sapiens
agcggtggcggagcgaacgggacc

SEQ ID NO: 4122 - DNA, 17 bp, Homo sapiens
agcggtgtcgtggccgt

SEQ ID NO: 4123 - DNA, 19 bp, Homo sapiens
agcggtgtggggccgcgtg

SEQ ID NO: 4124 - DNA, 18 bp, Homo sapiens
agcggttaggtggaccgg

SEQ ID NO: 4125 - DNA, 15 bp, Homo sapiens
agcggttggaggttg

SEQ ID NO: 4126 - DNA, 19 bp, Homo sapiens
agcggtttgtagtttgtag

SEQ ID NO: 4127 - DNA, 19 bp, Homo sapiens
agcgtaacttcattcttca

SEQ ID NO: 4128 - DNA, 18 bp, Homo sapiens
agcgtatcatgttaaaga

SEQ ID NO: 4129 - DNA, 19 bp, Homo sapiens
agcgtcagcagcgccgcag

SEQ ID NO: 4130 - DNA, 16 bp, Homo sapiens
agcgtccgggtcgcac

SEQ ID NO: 4131 - DNA, 18 bp, Homo sapiens
agcgtcgagctcccaaaa

SEQ ID NO: 4132 - DNA, 21 bp, Homo sapiens
agcgtcgagctcccaaaaccg

SEQ ID NO: 4133 - DNA, 19 bp, Homo sapiens
agcgtcgccgcgatggtgt

SEQ ID NO: 4134 - DNA, 21 bp, Homo sapiens
agcgtcggactaccgttggtt

SEQ ID NO: 4135 - DNA, 20 bp, Homo sapiens
agcgtcgggatatcgggtgg

SEQ ID NO: 4136 - DNA, 21 bp, Homo sapiens
agcgtcgggatatcgggtggc

SEQ ID NO: 4137 - DNA, 17 bp, Homo sapiens
agcgtctggggtttccg

SEQ ID NO: 4138 - DNA, 19 bp, Homo sapiens
agcgtcttcgctgctgctg

SEQ ID NO: 4139 - DNA, 16 bp, Homo sapiens
agcgtcttggcggcag

SEQ ID NO: 4140 - DNA, 18 bp, Homo sapiens
agcgtgactgcgctgcgc

SEQ ID NO: 4141 - DNA, 20 bp, Homo sapiens
agcgtgaggaaagccgtgcg

SEQ ID NO: 4142 - DNA, 19 bp, Homo sapiens
agcgtggacctgggacggg

SEQ ID NO: 4143 - DNA, 21 bp, Homo sapiens
agcgtggcgggttgtggtagg

SEQ ID NO: 4144 - DNA, 20 bp, Homo sapiens
agcgttgaggggagttccag

SEQ ID NO: 4145 - DNA, 20 bp, Homo sapiens
agctaaactcagcggagcca

SEQ ID NO: 4146 - DNA, 19 bp, Homo sapiens
agctaacaggtgggggcac

SEQ ID NO: 4147 - DNA, 17 bp, Homo sapiens
agctactgcaaggcaaa

SEQ ID NO: 4148 - DNA, 18 bp, Homo sapiens
agctactgcaaggcaaaa

SEQ ID NO: 4149 - DNA, 18 bp, Homo sapiens
agctagtggactagagcc

SEQ ID NO: 4150 - DNA, 18 bp, Homo sapiens
agctatagggcaggcggc

SEQ ID NO: 4151 - DNA, 17 bp, Homo sapiens
agctcattgttggcagc

SEQ ID NO: 4152 - DNA, 18 bp, Homo sapiens
agctcccagtggtgagtg

SEQ ID NO: 4153 - DNA, 23 bp, Homo sapiens
agctcctcctcctccacggctta

SEQ ID NO: 4154 - DNA, 18 bp, Homo sapiens
agctcctgctccgaagaa

SEQ ID NO: 4155 - DNA, 18 bp, Homo sapiens
agctcgagagagctaaca

SEQ ID NO: 4156 - DNA, 20 bp, Homo sapiens
gccgcgcgtgtggcagtcgc

SEQ ID NO: 4157 - DNA, 18 bp, Homo sapiens
gccgcgctagcgacgcgg

SEQ ID NO: 4158 - DNA, 19 bp, Homo sapiens
gccgcgctggggagagcgg

SEQ ID NO: 4159 - DNA, 18 bp, Homo sapiens
gccgcggacaccatgcag

SEQ ID NO: 4160 - DNA, 19 bp, Homo sapiens
gccgcggacaccatgcagt

SEQ ID NO: 4161 - DNA, 18 bp, Homo sapiens
gccgcggaccgagagggc

SEQ ID NO: 4162 - DNA, 19 bp, Homo sapiens
gccgcggacggcggagcgg

SEQ ID NO: 4163 - DNA, 17 bp, Homo sapiens
gccgcggagccggactg

SEQ ID NO: 4164 - DNA, 18 bp, Homo sapiens
gccgcggagggtcaggtc

SEQ ID NO: 4165 - DNA, 19 bp, Homo sapiens
gccgcggatggctcagggt

SEQ ID NO: 4166 - DNA, 17 bp, Homo sapiens
gccgcggcagcccgggc

SEQ ID NO: 4167 - DNA, 18 bp, Homo sapiens
gccgcggcatggggcgag

SEQ ID NO: 4168 - DNA, 18 bp, Homo sapiens
gccgcggccactgccggc

SEQ ID NO: 4169 - DNA, 23 bp, Homo sapiens
gccgcggccccacgctgggcgac

SEQ ID NO: 4170 - DNA, 17 bp, Homo sapiens
gccgcggcgcgggcccc

SEQ ID NO: 4171 - DNA, 23 bp, Homo sapiens
gccgcggcggccgctgggtgcag

SEQ ID NO: 4172 - DNA, 19 bp, Homo sapiens
gccgcggcggctgcaggcg

SEQ ID NO: 4173 - DNA, 18 bp, Homo sapiens
gccgcggcgtcctcgaca

SEQ ID NO: 4174 - DNA, 17 bp, Homo sapiens
gccgcggctgggagtgg

SEQ ID NO: 4175 - DNA, 19 bp, Homo sapiens
gccgcggctgggagtggtg

SEQ ID NO: 4176 - DNA, 21 bp, Homo sapiens
gccgcgggcggaagtgacgtt

SEQ ID NO: 4177 - DNA, 19 bp, Homo sapiens
gccgcgggctctgagcggg

SEQ ID NO: 4178 - DNA, 18 bp, Homo sapiens
gccgcgggtgagcgcggc

SEQ ID NO: 4179 - DNA, 19 bp, Homo sapiens
gccgcgtctgactgaggcg

SEQ ID NO: 4180 - DNA, 18 bp, Homo sapiens
gccgcgtctgcacgggtc

SEQ ID NO: 4181 - DNA, 19 bp, Homo sapiens
gccgctaccgcacttcggg

SEQ ID NO: 4182 - DNA, 19 bp, Homo sapiens
gccgctaggagactcatgg

SEQ ID NO: 4183 - DNA, 18 bp, Homo sapiens
gccgctcccgggccagcg

SEQ ID NO: 4184 - DNA, 19 bp, Homo sapiens
gccgctcctgcgggtcgga

SEQ ID NO: 4185 - DNA, 18 bp, Homo sapiens
gccgctcgtccgacccgc

SEQ ID NO: 4186 - DNA, 15 bp, Homo sapiens
gccgctctcgggctg

SEQ ID NO: 4187 - DNA, 21 bp, Homo sapiens
gccgctctcggtcgcgcggag

SEQ ID NO: 4188 - DNA, 16 bp, Homo sapiens
gccgctctgaggtgag

SEQ ID NO: 4189 - DNA, 19 bp, Homo sapiens
gccgctcttcttcgggctc

SEQ ID NO: 4190 - DNA, 19 bp, Homo sapiens
gccgctcttgcgggagcgt

SEQ ID NO: 4191 - DNA, 17 bp, Homo sapiens
gccgctgagctccaggc

SEQ ID NO: 4192 - DNA, 19 bp, Homo sapiens
gccgctgagctccaggctt

SEQ ID NO: 4193 - DNA, 21 bp, Homo sapiens
gccgctgatcggccgcgggtc

SEQ ID NO: 4194 - DNA, 20 bp, Homo sapiens
gccgctgcagacgaaaggca

SEQ ID NO: 4195 - DNA, 20 bp, Homo sapiens
gccgctgccgccgccatggc

SEQ ID NO: 4196 - DNA, 16 bp, Homo sapiens
gccgctgccggagggt

SEQ ID NO: 4197 - DNA, 20 bp, Homo sapiens
gccgctgcctaggggctgta

SEQ ID NO: 4198 - DNA, 17 bp, Homo sapiens
gccgctgcgaagggagg

SEQ ID NO: 4199 - DNA, 22 bp, Homo sapiens
gccgctgcgaagggaggtgagc

SEQ ID NO: 4200 - DNA, 18 bp, Homo sapiens
gccgctgcggacggacgc

SEQ ID NO: 4201 - DNA, 19 bp, Homo sapiens
gccgctgcggtaacggagc

SEQ ID NO: 4202 - DNA, 17 bp, Homo sapiens
gccgctggctgggacgc

SEQ ID NO: 4203 - DNA, 17 bp, Homo sapiens
gccgctgggcgtagctg

SEQ ID NO: 4204 - DNA, 18 bp, Homo sapiens
gccgctggtgatctccgg

SEQ ID NO: 4205 - DNA, 19 bp, Homo sapiens
gccgctggttccagtcaag

SEQ ID NO: 4206 - DNA, 20 bp, Homo sapiens
gccgctgtcgccggggctgg

SEQ ID NO: 4207 - DNA, 17 bp, Homo sapiens
gccgctgtggttgctgt

SEQ ID NO: 4208 - DNA, 23 bp, Homo sapiens
gccgcttcgcgttcggcggggga

SEQ ID NO: 4209 - DNA, 20 bp, Homo sapiens
gccgcttctgtggccacggc

SEQ ID NO: 4210 - DNA, 18 bp, Homo sapiens
gccggaaaaatgcagcca

SEQ ID NO: 4211 - DNA, 19 bp, Homo sapiens
gccggaaagatggtggtta

SEQ ID NO: 4212 - DNA, 18 bp, Homo sapiens
gccggaagacgctgtgtg

SEQ ID NO: 4213 - DNA, 17 bp, Homo sapiens
agctcggaaatggcggg

SEQ ID NO: 4214 - DNA, 20 bp, Homo sapiens
agctctgaaggcatggcgcg

SEQ ID NO: 4215 - DNA, 18 bp, Homo sapiens
agctctgagcgccggctg

SEQ ID NO: 4216 - DNA, 18 bp, Homo sapiens
agctctgcctgtaaggtc

SEQ ID NO: 4217 - DNA, 18 bp, Homo sapiens
agctgactccgcaggagc

SEQ ID NO: 4218 - DNA, 16 bp, Homo sapiens
agctgagagcgagagg

SEQ ID NO: 4219 - DNA, 18 bp, Homo sapiens
agctgagccaagcgttta

SEQ ID NO: 4220 - DNA, 22 bp, Homo sapiens
agctgaggagcagggccgggcg

SEQ ID NO: 4221 - DNA, 20 bp, Homo sapiens
agctgagtgtctcctgatac

SEQ ID NO: 4222 - DNA, 19 bp, Homo sapiens
agctgcagagaagaggagg

SEQ ID NO: 4223 - DNA, 21 bp, Homo sapiens
agctgcaggggtcggggattg

SEQ ID NO: 4224 - DNA, 23 bp, Homo sapiens
agctgccatcttgcgtccccgcg

SEQ ID NO: 4225 - DNA, 17 bp, Homo sapiens
agctgccgccattttgc

SEQ ID NO: 4226 - DNA, 20 bp, Homo sapiens
agctgccgctgtcgtctttg

SEQ ID NO: 4227 - DNA, 18 bp, Homo sapiens
agctgccgggcggtcctg

SEQ ID NO: 4228 - DNA, 18 bp, Homo sapiens
agctgcgagaacctttgc

SEQ ID NO: 4229 - DNA, 16 bp, Homo sapiens
agctgcgccgggacgg

SEQ ID NO: 4230 - DNA, 18 bp, Homo sapiens
agctgcgctccttcaccc

SEQ ID NO: 4231 - DNA, 16 bp, Homo sapiens
agctgcggacaggggc

SEQ ID NO: 4232 - DNA, 18 bp, Homo sapiens
agctgcggcgggagaaga

SEQ ID NO: 4233 - DNA, 18 bp, Homo sapiens
agctgcggttttggggtc

SEQ ID NO: 4234 - DNA, 18 bp, Homo sapiens
agctgctgtctgcggagg

SEQ ID NO: 4235 - DNA, 17 bp, Homo sapiens
agctgcttccgctgttt

SEQ ID NO: 4236 - DNA, 18 bp, Homo sapiens
agctggagtctgagccgg

SEQ ID NO: 4237 - DNA, 22 bp, Homo sapiens
agctggcagcatttgattgtgg

SEQ ID NO: 4238 - DNA, 18 bp, Homo sapiens
agctggcggcattgaggc

SEQ ID NO: 4239 - DNA, 18 bp, Homo sapiens
agctggctgagaggggac

SEQ ID NO: 4240 - DNA, 18 bp, Homo sapiens
agctgggagaatcgggaa

SEQ ID NO: 4241 - DNA, 16 bp, Homo sapiens
agctgggctccaattt

SEQ ID NO: 4242 - DNA, 21 bp, Homo sapiens
agctggggccggtggctccgg

SEQ ID NO: 4243 - DNA, 22 bp, Homo sapiens
agctggggccggtggctccgga

SEQ ID NO: 4244 - DNA, 18 bp, Homo sapiens
agctggggctgggcgccg

SEQ ID NO: 4245 - DNA, 19 bp, Homo sapiens
agctgggggaaacgacgcc

SEQ ID NO: 4246 - DNA, 18 bp, Homo sapiens
agctggtggaccgggcgg

SEQ ID NO: 4247 - DNA, 19 bp, Homo sapiens
agctgtcagtgccgccgcc

SEQ ID NO: 4248 - DNA, 20 bp, Homo sapiens
agctgtcgtgcctcgtggtc

SEQ ID NO: 4249 - DNA, 17 bp, Homo sapiens
agctgtggttgtgggcg

SEQ ID NO: 4250 - DNA, 20 bp, Homo sapiens
agctgttcctgaggctggca

SEQ ID NO: 4251 - DNA, 17 bp, Homo sapiens
agcttaggacagttggc

SEQ ID NO: 4252 - DNA, 20 bp, Homo sapiens
agcttaggacagttggctgt

SEQ ID NO: 4253 - DNA, 19 bp, Homo sapiens
agcttaggtcgggaaggga

SEQ ID NO: 4254 - DNA, 21 bp, Homo sapiens
agcttcgcgccgccgcccgtc

SEQ ID NO: 4255 - DNA, 16 bp, Homo sapiens
agcttctcgcgcacag

SEQ ID NO: 4256 - DNA, 19 bp, Homo sapiens
agcttctcttgtctctgac

SEQ ID NO: 4257 - DNA, 18 bp, Homo sapiens
agcttggctaaaagtaag

SEQ ID NO: 4258 - DNA, 20 bp, Homo sapiens
agcttgggctttgcacccgg

SEQ ID NO: 4259 - DNA, 19 bp, Homo sapiens
agctttcggcggcggctga

SEQ ID NO: 4260 - DNA, 18 bp, Homo sapiens
agctttctcaactatggc

SEQ ID NO: 4261 - DNA, 19 bp, Homo sapiens
agctttctcaactatggcc

SEQ ID NO: 4262 - DNA, 17 bp, Homo sapiens
agctttctcccgaacgc

SEQ ID NO: 4263 - DNA, 18 bp, Homo sapiens
agctttctcccgaacgcc

SEQ ID NO: 4264 - DNA, 19 bp, Homo sapiens
agctttctcccgaacgcca

SEQ ID NO: 4265 - DNA, 20 bp, Homo sapiens
agctttctcccgaacgccag

SEQ ID NO: 4266 - DNA, 17 bp, Homo sapiens
agctttggctaaggtga

SEQ ID NO: 4267 - DNA, 18 bp, Homo sapiens
aggaaaatgcgggacgcc

SEQ ID NO: 4268 - DNA, 19 bp, Homo sapiens
aggaaaatggcagctcccg

SEQ ID NO: 4269 - DNA, 21 bp, Homo sapiens
aggaaacaggaacaatggcta

SEQ ID NO: 4270 - DNA, 18 bp, Homo sapiens
gccggaagccgcgaggag

SEQ ID NO: 4271 - DNA, 17 bp, Homo sapiens
gccggaagcggaagtcg

SEQ ID NO: 4272 - DNA, 18 bp, Homo sapiens
gccggaagcggagagcgg

SEQ ID NO: 4273 - DNA, 19 bp, Homo sapiens
gccggaagcggagagcggc

SEQ ID NO: 4274 - DNA, 22 bp, Homo sapiens
gccggaagcggagagcggctga

SEQ ID NO: 4275 - DNA, 24 bp, Homo sapiens
gccggaagcggagagcggctgatc

SEQ ID NO: 4276 - DNA, 17 bp, Homo sapiens
gccggaagtaaacatta

SEQ ID NO: 4277 - DNA, 20 bp, Homo sapiens
gccggaagtgaggcaccctc

SEQ ID NO: 4278 - DNA, 18 bp, Homo sapiens
gccggaagtggctgaggc

SEQ ID NO: 4279 - DNA, 17 bp, Homo sapiens
gccggaagtgggaggtg

SEQ ID NO: 4280 - DNA, 19 bp, Homo sapiens
gccggaagtttcctcagtg

SEQ ID NO: 4281 - DNA, 20 bp, Homo sapiens
gccggaagtttcctcagtga

SEQ ID NO: 4282 - DNA, 21 bp, Homo sapiens
gccggacagtccagcgagcag

SEQ ID NO: 4283 - DNA, 19 bp, Homo sapiens
gccggacccagactggtag

SEQ ID NO: 4284 - DNA, 18 bp, Homo sapiens
gccggaccctcgcatcgg

SEQ ID NO: 4285 - DNA, 17 bp, Homo sapiens
gccggaccgggggcagg

SEQ ID NO: 4286 - DNA, 21 bp, Homo sapiens
gccggacggagagactgcggg

SEQ ID NO: 4287 - DNA, 18 bp, Homo sapiens
gccggacggcgtgggcgg

SEQ ID NO: 4288 - DNA, 18 bp, Homo sapiens
gccggacggctcccaggg

SEQ ID NO: 4289 - DNA, 18 bp, Homo sapiens
gccggacggggcggacgg

SEQ ID NO: 4290 - DNA, 20 bp, Homo sapiens
gccggacggtgggaacggaa

SEQ ID NO: 4291 - DNA, 21 bp, Homo sapiens
gccggacggtgggaacggaag

SEQ ID NO: 4292 - DNA, 21 bp, Homo sapiens
gccggacgttgcgcggccgcg

SEQ ID NO: 4293 - DNA, 16 bp, Homo sapiens
gccggactcaacgggt

SEQ ID NO: 4294 - DNA, 16 bp, Homo sapiens
gccggactggagggag

SEQ ID NO: 4295 - DNA, 17 bp, Homo sapiens
gccggactggagggaga

SEQ ID NO: 4296 - DNA, 19 bp, Homo sapiens
gccggactggagggagaca

SEQ ID NO: 4297 - DNA, 17 bp, Homo sapiens
gccggacttcgagggtg

SEQ ID NO: 4298 - DNA, 17 bp, Homo sapiens
gccggagaagaggagtg

SEQ ID NO: 4299 - DNA, 18 bp, Homo sapiens
gccggagaagaggagtga

SEQ ID NO: 4300 - DNA, 17 bp, Homo sapiens
gccggagaagatggcgg

SEQ ID NO: 4301 - DNA, 17 bp, Homo sapiens
gccggagaaggagcagg

SEQ ID NO: 4302 - DNA, 18 bp, Homo sapiens
gccggagacaggtaaccg

SEQ ID NO: 4303 - DNA, 20 bp, Homo sapiens
gccggagacaggtaaccgtg

SEQ ID NO: 4304 - DNA, 24 bp, Homo sapiens
gccggagacaggtaaccgtgcgct

SEQ ID NO: 4305 - DNA, 17 bp, Homo sapiens
gccggagacgctgcaga

SEQ ID NO: 4306 - DNA, 16 bp, Homo sapiens
gccggagacgtaggag

SEQ ID NO: 4307 - DNA, 18 bp, Homo sapiens
gccggagacgtaggagtg

SEQ ID NO: 4308 - DNA, 19 bp, Homo sapiens
gccggagacgtaggagtgg

SEQ ID NO: 4309 - DNA, 20 bp, Homo sapiens
gccggagacgtaggagtggg

SEQ ID NO: 4310 - DNA, 21 bp, Homo sapiens
gccggagacgtaggagtgggt

SEQ ID NO: 4311 - DNA, 18 bp, Homo sapiens
gccggagaggacgggcgc

SEQ ID NO: 4312 - DNA, 22 bp, Homo sapiens
gccggagaggtgggagtcggag

SEQ ID NO: 4313 - DNA, 24 bp, Homo sapiens
gccggagaggtgggagtcggagcg

SEQ ID NO: 4314 - DNA, 16 bp, Homo sapiens
gccggagatgcctgac

SEQ ID NO: 4315 - DNA, 17 bp, Homo sapiens
gccggagatggagtcga

SEQ ID NO: 4316 - DNA, 20 bp, Homo sapiens
gccggagcagccgcagcctg

SEQ ID NO: 4317 - DNA, 17 bp, Homo sapiens
gccggagcgagaagatg

SEQ ID NO: 4318 - DNA, 18 bp, Homo sapiens
gccggagcgagaagatgg

SEQ ID NO: 4319 - DNA, 18 bp, Homo sapiens
gccggagcgaggccgccg

SEQ ID NO: 4320 - DNA, 20 bp, Homo sapiens
gccggagcgcggccatggcg

SEQ ID NO: 4321 - DNA, 22 bp, Homo sapiens
gccggagcggagcggagcggag

SEQ ID NO: 4322 - DNA, 20 bp, Homo sapiens
gccggagcggaggagacgaa

SEQ ID NO: 4323 - DNA, 17 bp, Homo sapiens
gccggagcggcggcggc

SEQ ID NO: 4324 - DNA, 19 bp, Homo sapiens
gccggagcgggcgtcatgg

SEQ ID NO: 4325 - DNA, 19 bp, Homo sapiens
gccggagctgaacggcgcg

SEQ ID NO: 4326 - DNA, 18 bp, Homo sapiens
gccggagctgggcgcgga

SEQ ID NO: 4327 - DNA, 17 bp, Homo sapiens
aggaaactggctagaag

SEQ ID NO: 4328 - DNA, 18 bp, Homo sapiens
aggaaactggctagaaga

SEQ ID NO: 4329 - DNA, 19 bp, Homo sapiens
aggaaactggctagaagac

SEQ ID NO: 4330 - DNA, 18 bp, Homo sapiens
aggaaagaggcggaaccg

SEQ ID NO: 4331 - DNA, 18 bp, Homo sapiens
aggaaagatggaagacta

SEQ ID NO: 4332 - DNA, 18 bp, Homo sapiens
aggaaagctggctcggag

SEQ ID NO: 4333 - DNA, 16 bp, Homo sapiens
aggaaatgcggagccg

SEQ ID NO: 4334 - DNA, 18 bp, Homo sapiens
aggaaatgcggagccgcg

SEQ ID NO: 4335 - DNA, 23 bp, Homo sapiens
aggaacagccagtgggaggttcc

SEQ ID NO: 4336 - DNA, 19 bp, Homo sapiens
aggaacatggctcctgagg

SEQ ID NO: 4337 - DNA, 18 bp, Homo sapiens
aggaaccaggaaggatta

SEQ ID NO: 4338 - DNA, 21 bp, Homo sapiens
aggaacgcgggccgaggctgg

SEQ ID NO: 4339 - DNA, 17 bp, Homo sapiens
aggaacggggggtcctc

SEQ ID NO: 4340 - DNA, 18 bp, Homo sapiens
aggaacggtttggggcag

SEQ ID NO: 4341 - DNA, 19 bp, Homo sapiens
aggaactggatgacgggcc

SEQ ID NO: 4342 - DNA, 21 bp, Homo sapiens
aggaagactgggaggcgctaa

SEQ ID NO: 4343 - DNA, 18 bp, Homo sapiens
aggaagagaacagaaagg

SEQ ID NO: 4344 - DNA, 18 bp, Homo sapiens
aggaagagaagagccgtg

SEQ ID NO: 4345 - DNA, 18 bp, Homo sapiens
aggaagagaaggagcaca

SEQ ID NO: 4346 - DNA, 21 bp, Homo sapiens
aggaagagagaagctgggaga

SEQ ID NO: 4347 - DNA, 22 bp, Homo sapiens
aggaagagagaagctgggagaa

SEQ ID NO: 4348 - DNA, 17 bp, Homo sapiens
aggaagagccgagactg

SEQ ID NO: 4349 - DNA, 19 bp, Homo sapiens
aggaagaggcgttgcggcg

SEQ ID NO: 4350 - DNA, 19 bp, Homo sapiens
aggaagagggcgaggcgac

SEQ ID NO: 4351 - DNA, 18 bp, Homo sapiens
aggaagatgaacagcccc

SEQ ID NO: 4352 - DNA, 19 bp, Homo sapiens
aggaagatggcggacggcg

SEQ ID NO: 4353 - DNA, 18 bp, Homo sapiens
aggaagatggcggtggag

SEQ ID NO: 4354 - DNA, 19 bp, Homo sapiens
aggaagatggcggtggagt

SEQ ID NO: 4355 - DNA, 16 bp, Homo sapiens
aggaagattgtgcatg

SEQ ID NO: 4356 - DNA, 19 bp, Homo sapiens
aggaagattgtgcatgccg

SEQ ID NO: 4357 - DNA, 21 bp, Homo sapiens
aggaagccggacgtgggcggg

SEQ ID NO: 4358 - DNA, 17 bp, Homo sapiens
aggaagcctgggaagga

SEQ ID NO: 4359 - DNA, 19 bp, Homo sapiens
aggaagcgcagggacagag

SEQ ID NO: 4360 - DNA, 19 bp, Homo sapiens
aggaagcgcggtgtgaaca

SEQ ID NO: 4361 - DNA, 18 bp, Homo sapiens
aggaagcggcggatccgg

SEQ ID NO: 4362 - DNA, 19 bp, Homo sapiens
aggaaggacggagaagggg

SEQ ID NO: 4363 - DNA, 17 bp, Homo sapiens
aggaaggaggcgaactg

SEQ ID NO: 4364 - DNA, 21 bp, Homo sapiens
aggaaggcgaccggcagcctc

SEQ ID NO: 4365 - DNA, 16 bp, Homo sapiens
aggaaggcgcttccgc

SEQ ID NO: 4366 - DNA, 21 bp, Homo sapiens
aggaagggcagaagtccctgg

SEQ ID NO: 4367 - DNA, 22 bp, Homo sapiens
aggaagggcagaagtccctggc

SEQ ID NO: 4368 - DNA, 18 bp, Homo sapiens
aggaaggggcggagctgc

SEQ ID NO: 4369 - DNA, 18 bp, Homo sapiens
aggaaggtggcaagatgg

SEQ ID NO: 4370 - DNA, 22 bp, Homo sapiens
aggaagtctctgaacaggcggc

SEQ ID NO: 4371 - DNA, 18 bp, Homo sapiens
aggaagtgaactgagggc

SEQ ID NO: 4372 - DNA, 16 bp, Homo sapiens
aggaagtgaggacggc

SEQ ID NO: 4373 - DNA, 24 bp, Homo sapiens
aggaagtgcgtctgggcccggccc

SEQ ID NO: 4374 - DNA, 18 bp, Homo sapiens
aggaagtggaagaaacgc

SEQ ID NO: 4375 - DNA, 20 bp, Homo sapiens
aggaagtggtgagttcggag

SEQ ID NO: 4376 - DNA, 18 bp, Homo sapiens
aggaataggaatcatggc

SEQ ID NO: 4377 - DNA, 21 bp, Homo sapiens
aggaataggaatcatggcggc

SEQ ID NO: 4378 - DNA, 20 bp, Homo sapiens
aggaatgtggaaggtggcgg

SEQ ID NO: 4379 - DNA, 22 bp, Homo sapiens
aggaatgtggtgacgtcatcgg

SEQ ID NO: 4380 - DNA, 22 bp, Homo sapiens
aggacacattgatcatcgacac

SEQ ID NO: 4381 - DNA, 19 bp, Homo sapiens
aggacagcagagacaacag

SEQ ID NO: 4382 - DNA, 20 bp, Homo sapiens
aggacaggacaatggcggcc

SEQ ID NO: 4383 - DNA, 20 bp, Homo sapiens
aggacaggacgaagccggag

SEQ ID NO: 4384 - DNA, 19 bp, Homo sapiens
gccggagctgggcgcggat

SEQ ID NO: 4385 - DNA, 18 bp, Homo sapiens
gccggaggagaggaagat

SEQ ID NO: 4386 - DNA, 17 bp, Homo sapiens
gccggaggagccgccgc

SEQ ID NO: 4387 - DNA, 17 bp, Homo sapiens
gccggaggagtccgaga

SEQ ID NO: 4388 - DNA, 17 bp, Homo sapiens
gccggaggatcgagcgg

SEQ ID NO: 4389 - DNA, 17 bp, Homo sapiens
gccggaggatcgcggag

SEQ ID NO: 4390 - DNA, 19 bp, Homo sapiens
gccggaggcggaggttctg

SEQ ID NO: 4391 - DNA, 17 bp, Homo sapiens
gccggaggctgggcagc

SEQ ID NO: 4392 - DNA, 18 bp, Homo sapiens
gccggaggctgggcagct

SEQ ID NO: 4393 - DNA, 21 bp, Homo sapiens
gccggagggaagatggcggcg

SEQ ID NO: 4394 - DNA, 17 bp, Homo sapiens
gccggaggtggtagcgg

SEQ ID NO: 4395 - DNA, 17 bp, Homo sapiens
gccggagtcgtcttcgg

SEQ ID NO: 4396 - DNA, 19 bp, Homo sapiens
gccggagtgaggcgaggcc

SEQ ID NO: 4397 - DNA, 20 bp, Homo sapiens
gccggagtgaggcgaggccg

SEQ ID NO: 4398 - DNA, 21 bp, Homo sapiens
gccggagtgaggcgaggccgc

SEQ ID NO: 4399 - DNA, 16 bp, Homo sapiens
gccggagtggagcggc

SEQ ID NO: 4400 - DNA, 19 bp, Homo sapiens
gccggagtttcactttgta

SEQ ID NO: 4401 - DNA, 22 bp, Homo sapiens
gccggatcctattgttagccgg

SEQ ID NO: 4402 - DNA, 21 bp, Homo sapiens
gccggatctcgtctcgctcag

SEQ ID NO: 4403 - DNA, 20 bp, Homo sapiens
gccggatctggccgggggcc

SEQ ID NO: 4404 - DNA, 16 bp, Homo sapiens
gccggatgggcgggac

SEQ ID NO: 4405 - DNA, 20 bp, Homo sapiens
gccggcacctcattcatttc

SEQ ID NO: 4406 - DNA, 22 bp, Homo sapiens
gccggcacctcattcatttcta

SEQ ID NO: 4407 - DNA, 19 bp, Homo sapiens
gccggcactcgctcagcga

SEQ ID NO: 4408 - DNA, 17 bp, Homo sapiens
gccggcagagccgccga

SEQ ID NO: 4409 - DNA, 19 bp, Homo sapiens
gccggcagcgcaggcgggc

SEQ ID NO: 4410 - DNA, 18 bp, Homo sapiens
gccggcatcatgaccctg

SEQ ID NO: 4411 - DNA, 18 bp, Homo sapiens
gccggcattcagagcccc

SEQ ID NO: 4412 - DNA, 23 bp, Homo sapiens
gccggcctggcagggcagctcgg

SEQ ID NO: 4413 - DNA, 16 bp, Homo sapiens
gccggcctttgtctgc

SEQ ID NO: 4414 - DNA, 18 bp, Homo sapiens
gccggcgacattagctag

SEQ ID NO: 4415 - DNA, 20 bp, Homo sapiens
gccggcgacattagctagcg

SEQ ID NO: 4416 - DNA, 21 bp, Homo sapiens
gccggcgacattagctagcgc

SEQ ID NO: 4417 - DNA, 17 bp, Homo sapiens
gccggcgcacaagatgg

SEQ ID NO: 4418 - DNA, 21 bp, Homo sapiens
gccggcgccatccctatagag

SEQ ID NO: 4419 - DNA, 17 bp, Homo sapiens
gccggcgcccttcctct

SEQ ID NO: 4420 - DNA, 20 bp, Homo sapiens
gccggcgcgggagggctgtg

SEQ ID NO: 4421 - DNA, 17 bp, Homo sapiens
gccggcgctgagagggg

SEQ ID NO: 4422 - DNA, 18 bp, Homo sapiens
gccggcggacagtgaggg

SEQ ID NO: 4423 - DNA, 20 bp, Homo sapiens
gccggcggacagtgagggcg

SEQ ID NO: 4424 - DNA, 17 bp, Homo sapiens
gccggcgggcgcagcct

SEQ ID NO: 4425 - DNA, 18 bp, Homo sapiens
gccggcgggcggctgagg

SEQ ID NO: 4426 - DNA, 20 bp, Homo sapiens
gccggcgggggtcacgaggc

SEQ ID NO: 4427 - DNA, 17 bp, Homo sapiens
gccggcgggtgccgctg

SEQ ID NO: 4428 - DNA, 18 bp, Homo sapiens
gccggcggttccggagcc

SEQ ID NO: 4429 - DNA, 19 bp, Homo sapiens
gccggctccgcccggctgc

SEQ ID NO: 4430 - DNA, 17 bp, Homo sapiens
gccggctgctacgcatg

SEQ ID NO: 4431 - DNA, 17 bp, Homo sapiens
gccggctgggagtaggc

SEQ ID NO: 4432 - DNA, 21 bp, Homo sapiens
gccggctgtgaggaaggaggt

SEQ ID NO: 4433 - DNA, 19 bp, Homo sapiens
gccggcttggctagcgcgc

SEQ ID NO: 4434 - DNA, 17 bp, Homo sapiens
gccgggaagatgagcac

SEQ ID NO: 4435 - DNA, 18 bp, Homo sapiens
gccgggaagcagttgctg

SEQ ID NO: 4436 - DNA, 18 bp, Homo sapiens
gccgggacaaggcgccgg

SEQ ID NO: 4437 - DNA, 18 bp, Homo sapiens
gccgggacctcgagcgaa

SEQ ID NO: 4438 - DNA, 18 bp, Homo sapiens
gccgggacggtaagcgat

SEQ ID NO: 4439 - DNA, 21 bp, Homo sapiens
gccgggacggtaagcgatcgc

SEQ ID NO: 4440 - DNA, 16 bp, Homo sapiens
gccgggacggttggag

SEQ ID NO: 4441 - DNA, 21 bp, Homo sapiens
aggacaggcagacggacaggc

SEQ ID NO: 4442 - DNA, 16 bp, Homo sapiens
aggaccacgcgcccgc

SEQ ID NO: 4443 - DNA, 17 bp, Homo sapiens
aggaccccggcggcaga

SEQ ID NO: 4444 - DNA, 20 bp, Homo sapiens
aggaccgagggtggcagagg

SEQ ID NO: 4445 - DNA, 16 bp, Homo sapiens
aggaccggaggaccga

SEQ ID NO: 4446 - DNA, 18 bp, Homo sapiens
aggaccggcaacatggtg

SEQ ID NO: 4447 - DNA, 18 bp, Homo sapiens
aggaccggcgaggaatag

SEQ ID NO: 4448 - DNA, 19 bp, Homo sapiens
aggaccggcgaggaatagg

SEQ ID NO: 4449 - DNA, 22 bp, Homo sapiens
aggaccgggagagcagtggggg

SEQ ID NO: 4450 - DNA, 19 bp, Homo sapiens
aggacctggccaggaagcg

SEQ ID NO: 4451 - DNA, 16 bp, Homo sapiens
aggacgaaggggaagg

SEQ ID NO: 4452 - DNA, 18 bp, Homo sapiens
aggacgcacagatgagag

SEQ ID NO: 4453 - DNA, 17 bp, Homo sapiens
aggacgcggcaaaggag

SEQ ID NO: 4454 - DNA, 18 bp, Homo sapiens
aggacgcgggagggctgg

SEQ ID NO: 4455 - DNA, 13 bp, Homo sapiens
aggacggcgcgaa

SEQ ID NO: 4456 - DNA, 18 bp, Homo sapiens
aggacggcttcggggatg

SEQ ID NO: 4457 - DNA, 22 bp, Homo sapiens
aggacggggcgtgccccgacgt

SEQ ID NO: 4458 - DNA, 16 bp, Homo sapiens
aggacggtagccggta

SEQ ID NO: 4459 - DNA, 17 bp, Homo sapiens
aggacggtagccggtat

SEQ ID NO: 4460 - DNA, 18 bp, Homo sapiens
aggacggtagccggtatt

SEQ ID NO: 4461 - DNA, 18 bp, Homo sapiens
aggacgtggagcgaaatg

SEQ ID NO: 4462 - DNA, 18 bp, Homo sapiens
aggactacgagcaggagc

SEQ ID NO: 4463 - DNA, 18 bp, Homo sapiens
aggactactacgggagcg

SEQ ID NO: 4464 - DNA, 19 bp, Homo sapiens
aggactactacgggagcgc

SEQ ID NO: 4465 - DNA, 18 bp, Homo sapiens
aggactagcgaggaggag

SEQ ID NO: 4466 - DNA, 19 bp, Homo sapiens
aggactagcgaggaggagt

SEQ ID NO: 4467 - DNA, 19 bp, Homo sapiens
aggactaggaaggtgcccc

SEQ ID NO: 4468 - DNA, 20 bp, Homo sapiens
aggactaggaaggtgccccg

SEQ ID NO: 4469 - DNA, 16 bp, Homo sapiens
aggactccaaaatggc

SEQ ID NO: 4470 - DNA, 19 bp, Homo sapiens
aggactgcagtgtaggact

SEQ ID NO: 4471 - DNA, 19 bp, Homo sapiens
aggactgcgaggacggcga

SEQ ID NO: 4472 - DNA, 16 bp, Homo sapiens
aggactgggctaaccg

SEQ ID NO: 4473 - DNA, 20 bp, Homo sapiens
aggagaaactcgctcgcctt

SEQ ID NO: 4474 - DNA, 19 bp, Homo sapiens
aggagaagcagcgtctgag

SEQ ID NO: 4475 - DNA, 18 bp, Homo sapiens
aggagaagggcggcgaga

SEQ ID NO: 4476 - DNA, 18 bp, Homo sapiens
aggagaagtaggaacgag

SEQ ID NO: 4477 - DNA, 17 bp, Homo sapiens
aggagaatggcggcgga

SEQ ID NO: 4478 - DNA, 17 bp, Homo sapiens
aggagaccaacggaccg

SEQ ID NO: 4479 - DNA, 18 bp, Homo sapiens
aggagaccaacggaccgg

SEQ ID NO: 4480 - DNA, 20 bp, Homo sapiens
aggagacgcagggcgacgcc

SEQ ID NO: 4481 - DNA, 24 bp, Homo sapiens
aggagacgctcctgagagaagggc

SEQ ID NO: 4482 - DNA, 18 bp, Homo sapiens
aggagactaggggagctg

SEQ ID NO: 4483 - DNA, 18 bp, Homo sapiens
aggagactatggaacgtc

SEQ ID NO: 4484 - DNA, 19 bp, Homo sapiens
aggagagagaacgttctag

SEQ ID NO: 4485 - DNA, 18 bp, Homo sapiens
aggagagctgaggccgcg

SEQ ID NO: 4486 - DNA, 18 bp, Homo sapiens
aggagatccgctcacaca

SEQ ID NO: 4487 - DNA, 19 bp, Homo sapiens
aggagatgaacgagattaa

SEQ ID NO: 4488 - DNA, 18 bp, Homo sapiens
aggagcaagccgagagcc

SEQ ID NO: 4489 - DNA, 16 bp, Homo sapiens
aggagcagcctccgcc

SEQ ID NO: 4490 - DNA, 19 bp, Homo sapiens
aggagcagcctgtgggcac

SEQ ID NO: 4491 - DNA, 18 bp, Homo sapiens
aggagcagcgatggacgg

SEQ ID NO: 4492 - DNA, 18 bp, Homo sapiens
aggagcagcgcggacccg

SEQ ID NO: 4493 - DNA, 18 bp, Homo sapiens
aggagcatggagggacgg

SEQ ID NO: 4494 - DNA, 18 bp, Homo sapiens
aggagccagagaaaccga

SEQ ID NO: 4495 - DNA, 18 bp, Homo sapiens
aggagccgatcaggaact

SEQ ID NO: 4496 - DNA, 18 bp, Homo sapiens
aggagccggaactgtggg

SEQ ID NO: 4497 - DNA, 18 bp, Homo sapiens
aggagccggggaaacccc

SEQ ID NO: 4498 - DNA, 18 bp, Homo sapiens
gccgggacggttggagaa

SEQ ID NO: 4499 - DNA, 19 bp, Homo sapiens
gccgggacggttggagaag

SEQ ID NO: 4500 - DNA, 19 bp, Homo sapiens
gccgggactgggccggcgc

SEQ ID NO: 4501 - DNA, 17 bp, Homo sapiens
gccgggactggtggccc

SEQ ID NO: 4502 - DNA, 18 bp, Homo sapiens
gccgggagaaactgctga

SEQ ID NO: 4503 - DNA, 18 bp, Homo sapiens
gccgggagagggagaaca

SEQ ID NO: 4504 - DNA, 18 bp, Homo sapiens
gccgggagagtggtggca

SEQ ID NO: 4505 - DNA, 16 bp, Homo sapiens
gccgggagcgctagcg

SEQ ID NO: 4506 - DNA, 19 bp, Homo sapiens
gccgggagcggacttacct

SEQ ID NO: 4507 - DNA, 17 bp, Homo sapiens
gccgggagctctgaggg

SEQ ID NO: 4508 - DNA, 21 bp, Homo sapiens
gccgggaggctggagcccagc

SEQ ID NO: 4509 - DNA, 21 bp, Homo sapiens
gccgggagggtaggatggcgt

SEQ ID NO: 4510 - DNA, 23 bp, Homo sapiens
gccgggagggtaggatggcgtct

SEQ ID NO: 4511 - DNA, 19 bp, Homo sapiens
gccgggaggtttgagtttg

SEQ ID NO: 4512 - DNA, 18 bp, Homo sapiens
gccgggagtccggtgaac

SEQ ID NO: 4513 - DNA, 18 bp, Homo sapiens
gccgggcaactgggcccc

SEQ ID NO: 4514 - DNA, 18 bp, Homo sapiens
gccgggcagaagagagcg

SEQ ID NO: 4515 - DNA, 17 bp, Homo sapiens
gccgggccaacgcgggc

SEQ ID NO: 4516 - DNA, 18 bp, Homo sapiens
gccgggccagggtcaagc

SEQ ID NO: 4517 - DNA, 17 bp, Homo sapiens
gccgggccgacagcagc

SEQ ID NO: 4518 - DNA, 20 bp, Homo sapiens
gccgggccgacgaggcacac

SEQ ID NO: 4519 - DNA, 18 bp, Homo sapiens
gccgggccggaagaagag

SEQ ID NO: 4520 - DNA, 17 bp, Homo sapiens
gccgggccgggaagcag

SEQ ID NO: 4521 - DNA, 21 bp, Homo sapiens
gccgggccgggatggcggcca

SEQ ID NO: 4522 - DNA, 18 bp, Homo sapiens
gccgggcgcgcggctgag

SEQ ID NO: 4523 - DNA, 18 bp, Homo sapiens
gccgggcggcggtggctg

SEQ ID NO: 4524 - DNA, 20 bp, Homo sapiens
gccgggcggcggtggctgta

SEQ ID NO: 4525 - DNA, 22 bp, Homo sapiens
gccgggcggcggtggctgtagg

SEQ ID NO: 4526 - DNA, 22 bp, Homo sapiens
gccgggcggctgcaatatggcg

SEQ ID NO: 4527 - DNA, 17 bp, Homo sapiens
gccgggcgggagaagag

SEQ ID NO: 4528 - DNA, 17 bp, Homo sapiens
gccgggcgggccaggag

SEQ ID NO: 4529 - DNA, 19 bp, Homo sapiens
gccgggcggtcctgccgag

SEQ ID NO: 4530 - DNA, 17 bp, Homo sapiens
gccgggcgtagacgcgg

SEQ ID NO: 4531 - DNA, 19 bp, Homo sapiens
gccgggcgtagacgcggtg

SEQ ID NO: 4532 - DNA, 21 bp, Homo sapiens
gccgggcgtggtgtcggtggg

SEQ ID NO: 4533 - DNA, 19 bp, Homo sapiens
gccgggctcggagtggacg

SEQ ID NO: 4534 - DNA, 19 bp, Homo sapiens
gccgggctgccagcggtga

SEQ ID NO: 4535 - DNA, 20 bp, Homo sapiens
gccgggctgccagcggtgag

SEQ ID NO: 4536 - DNA, 17 bp, Homo sapiens
gccgggctgcgacactg

SEQ ID NO: 4537 - DNA, 18 bp, Homo sapiens
gccgggctgctccgcggg

SEQ ID NO: 4538 - DNA, 21 bp, Homo sapiens
gccgggctggcggaagaggca

SEQ ID NO: 4539 - DNA, 22 bp, Homo sapiens
gccgggctggctatcgagcgag

SEQ ID NO: 4540 - DNA, 18 bp, Homo sapiens
gccgggctgggatagcgc

SEQ ID NO: 4541 - DNA, 16 bp, Homo sapiens
gccggggacggagaga

SEQ ID NO: 4542 - DNA, 20 bp, Homo sapiens
gccggggagcgcgcggcggc

SEQ ID NO: 4543 - DNA, 22 bp, Homo sapiens
gccggggaggaggggcggcggc

SEQ ID NO: 4544 - DNA, 20 bp, Homo sapiens
gccggggcaggcaccgcggc

SEQ ID NO: 4545 - DNA, 18 bp, Homo sapiens
gccggggcagtgcggctc

SEQ ID NO: 4546 - DNA, 19 bp, Homo sapiens
gccggggccgagccctccg

SEQ ID NO: 4547 - DNA, 17 bp, Homo sapiens
gccgggggacgtcgggc

SEQ ID NO: 4548 - DNA, 18 bp, Homo sapiens
gccgggggagaatagggt

SEQ ID NO: 4549 - DNA, 23 bp, Homo sapiens
gccgggggccatggacggagcag

SEQ ID NO: 4550 - DNA, 19 bp, Homo sapiens
gccgggggctctagtgaac

SEQ ID NO: 4551 - DNA, 21 bp, Homo sapiens
gccgggggctctagtgaacag

SEQ ID NO: 4552 - DNA, 16 bp, Homo sapiens
gccgggtccggacggg

SEQ ID NO: 4553 - DNA, 18 bp, Homo sapiens
gccgggtgagtgagagag

SEQ ID NO: 4554 - DNA, 19 bp, Homo sapiens
gccgggtgagtgagagagt

SEQ ID NO: 4555 - DNA, 22 bp, Homo sapiens
aggagcctgggaaggaagaggg

SEQ ID NO: 4556 - DNA, 19 bp, Homo sapiens
aggagcgaagctctggccc

SEQ ID NO: 4557 - DNA, 15 bp, Homo sapiens
aggagcggctctcgg

SEQ ID NO: 4558 - DNA, 23 bp, Homo sapiens
aggagcgggcggaggaggaagtg

SEQ ID NO: 4559 - DNA, 18 bp, Homo sapiens
aggagcggtaactacccc

SEQ ID NO: 4560 - DNA, 17 bp, Homo sapiens
aggagctgcctcgcgca

SEQ ID NO: 4561 - DNA, 17 bp, Homo sapiens
aggagctggagggggcg

SEQ ID NO: 4562 - DNA, 18 bp, Homo sapiens
aggaggaaggcgccgccg

SEQ ID NO: 4563 - DNA, 18 bp, Homo sapiens
aggaggagaacatccgcg

SEQ ID NO: 4564 - DNA, 18 bp, Homo sapiens
aggaggagccggagacgc

SEQ ID NO: 4565 - DNA, 18 bp, Homo sapiens
aggaggagctggaggaag

SEQ ID NO: 4566 - DNA, 19 bp, Homo sapiens
aggaggagctggaggaagc

SEQ ID NO: 4567 - DNA, 20 bp, Homo sapiens
aggaggaggaggaagaagag

SEQ ID NO: 4568 - DNA, 18 bp, Homo sapiens
aggaggagggagaggctg

SEQ ID NO: 4569 - DNA, 20 bp, Homo sapiens
aggaggagggcgctccaggc

SEQ ID NO: 4570 - DNA, 19 bp, Homo sapiens
aggaggatgaggaagcgcg

SEQ ID NO: 4571 - DNA, 19 bp, Homo sapiens
aggaggcagagggcacacc

SEQ ID NO: 4572 - DNA, 18 bp, Homo sapiens
aggaggcagcgtgagagc

SEQ ID NO: 4573 - DNA, 18 bp, Homo sapiens
aggaggcaggtttcggga

SEQ ID NO: 4574 - DNA, 19 bp, Homo sapiens
aggaggccgcgggccggga

SEQ ID NO: 4575 - DNA, 15 bp, Homo sapiens
aggaggcggaggcgg

SEQ ID NO: 4576 - DNA, 21 bp, Homo sapiens
aggaggcggcggcggccgcag

SEQ ID NO: 4577 - DNA, 19 bp, Homo sapiens
aggaggcggttcggacggc

SEQ ID NO: 4578 - DNA, 18 bp, Homo sapiens
aggaggctcgggtcgttg

SEQ ID NO: 4579 - DNA, 19 bp, Homo sapiens
aggagggagaccacagagc

SEQ ID NO: 4580 - DNA, 19 bp, Homo sapiens
aggagggagccccgaccgt

SEQ ID NO: 4581 - DNA, 20 bp, Homo sapiens
aggagggatttcggcctgag

SEQ ID NO: 4582 - DNA, 19 bp, Homo sapiens
aggagggcgctccaggcga

SEQ ID NO: 4583 - DNA, 18 bp, Homo sapiens
aggaggtgagggagactg

SEQ ID NO: 4584 - DNA, 19 bp, Homo sapiens
aggaggtgagggagactgg

SEQ ID NO: 4585 - DNA, 18 bp, Homo sapiens
aggaggtggcagggacaa

SEQ ID NO: 4586 - DNA, 22 bp, Homo sapiens
aggaggtgtagcgtgagactgg

SEQ ID NO: 4587 - DNA, 20 bp, Homo sapiens
aggagtacgcgcgagagcct

SEQ ID NO: 4588 - DNA, 18 bp, Homo sapiens
aggagtcgcgcggaggac

SEQ ID NO: 4589 - DNA, 22 bp, Homo sapiens
aggagtcggggtcttccccagt

SEQ ID NO: 4590 - DNA, 18 bp, Homo sapiens
aggagtgaggatgtccct

SEQ ID NO: 4591 - DNA, 18 bp, Homo sapiens
aggagtgcagagaggtct

SEQ ID NO: 4592 - DNA, 21 bp, Homo sapiens
aggagtgcagagaggtctcat

SEQ ID NO: 4593 - DNA, 17 bp, Homo sapiens
aggagtgggtagaagcg

SEQ ID NO: 4594 - DNA, 18 bp, Homo sapiens
aggagtgggtagaagcgg

SEQ ID NO: 4595 - DNA, 18 bp, Homo sapiens
aggagtggttgcggggcg

SEQ ID NO: 4596 - DNA, 16 bp, Homo sapiens
aggatctagcgaaata

SEQ ID NO: 4597 - DNA, 17 bp, Homo sapiens
aggatgaatgtgataga

SEQ ID NO: 4598 - DNA, 19 bp, Homo sapiens
aggatgaggaagcgcgggc

SEQ ID NO: 4599 - DNA, 19 bp, Homo sapiens
aggatggggacggtgagga

SEQ ID NO: 4600 - DNA, 23 bp, Homo sapiens
aggatgtggtggcgactggcgcc

SEQ ID NO: 4601 - DNA, 19 bp, Homo sapiens
aggattagagcaggcggtg

SEQ ID NO: 4602 - DNA, 21 bp, Homo sapiens
aggattcgttggctgccgtcc

SEQ ID NO: 4603 - DNA, 19 bp, Homo sapiens
aggattgaatacagagacg

SEQ ID NO: 4604 - DNA, 21 bp, Homo sapiens
aggattgaatacagagacgct

SEQ ID NO: 4605 - DNA, 23 bp, Homo sapiens
aggattgaatacagagacgctgt

SEQ ID NO: 4606 - DNA, 19 bp, Homo sapiens
aggcaaaggtggtaaaggt

SEQ ID NO: 4607 - DNA, 18 bp, Homo sapiens
aggcaacccctaagcagg

SEQ ID NO: 4608 - DNA, 18 bp, Homo sapiens
aggcaagaaggacttggt

SEQ ID NO: 4609 - DNA, 21 bp, Homo sapiens
aggcaagactggcacccagca

SEQ ID NO: 4610 - DNA, 18 bp, Homo sapiens
aggcaagagcagcgaccg

SEQ ID NO: 4611 - DNA, 18 bp, Homo sapiens
aggcaagatggtgagtga

SEQ ID NO: 4612 - DNA, 22 bp, Homo sapiens
gccgggtgagtgagagagttgg

SEQ ID NO: 4613 - DNA, 23 bp, Homo sapiens
gccgggtgagtgagagagttggt

SEQ ID NO: 4614 - DNA, 17 bp, Homo sapiens
gccgggtgagtggaggc

SEQ ID NO: 4615 - DNA, 19 bp, Homo sapiens
gccgggtgagtggccccgc

SEQ ID NO: 4616 - DNA, 22 bp, Homo sapiens
gccgggtggcacagcggtgtcg

SEQ ID NO: 4617 - DNA, 20 bp, Homo sapiens
gccgggttgagctgcggcac

SEQ ID NO: 4618 - DNA, 18 bp, Homo sapiens
gccgggttgccagcggag

SEQ ID NO: 4619 - DNA, 19 bp, Homo sapiens
gccggtaagtagaagcttg

SEQ ID NO: 4620 - DNA, 20 bp, Homo sapiens
gccggtcaggacaaggatag

SEQ ID NO: 4621 - DNA, 17 bp, Homo sapiens
gccggtcgttcggacgt

SEQ ID NO: 4622 - DNA, 18 bp, Homo sapiens
gccggtcgttcggacgtc

SEQ ID NO: 4623 - DNA, 18 bp, Homo sapiens
gccggtctttcgggggct

SEQ ID NO: 4624 - DNA, 18 bp, Homo sapiens
gccggtgcttccggtggc

SEQ ID NO: 4625 - DNA, 16 bp, Homo sapiens
gccggtggagaccgac

SEQ ID NO: 4626 - DNA, 17 bp, Homo sapiens
gccggtggccgcggcag

SEQ ID NO: 4627 - DNA, 22 bp, Homo sapiens
gccggtgggaactgaggaagcg

SEQ ID NO: 4628 - DNA, 18 bp, Homo sapiens
gccggttgaggttgctgg

SEQ ID NO: 4629 - DNA, 16 bp, Homo sapiens
gccgtaaatagagtcc

SEQ ID NO: 4630 - DNA, 21 bp, Homo sapiens
gccgtaatggcgttcttggcg

SEQ ID NO: 4631 - DNA, 18 bp, Homo sapiens
gccgtagaaggagacctg

SEQ ID NO: 4632 - DNA, 16 bp, Homo sapiens
gccgtagccgtgtgaa

SEQ ID NO: 4633 - DNA, 17 bp, Homo sapiens
gccgtaggctaacgtgg

SEQ ID NO: 4634 - DNA, 17 bp, Homo sapiens
gccgtagtagcgggcca

SEQ ID NO: 4635 - DNA, 17 bp, Homo sapiens
gccgtcatggagagcgg

SEQ ID NO: 4636 - DNA, 18 bp, Homo sapiens
gccgtccaggacgtggag

SEQ ID NO: 4637 - DNA, 18 bp, Homo sapiens
gccgtcccgagagcaaca

SEQ ID NO: 4638 - DNA, 18 bp, Homo sapiens
gccgtccctgctgcctca

SEQ ID NO: 4639 - DNA, 19 bp, Homo sapiens
gccgtcctgcagatgtgcg

SEQ ID NO: 4640 - DNA, 18 bp, Homo sapiens
gccgtcggagagtgcgtg

SEQ ID NO: 4641 - DNA, 18 bp, Homo sapiens
gccgtcggcggaggcgcc

SEQ ID NO: 4642 - DNA, 19 bp, Homo sapiens
gccgtcggcggaggcgcca

SEQ ID NO: 4643 - DNA, 20 bp, Homo sapiens
gccgtcggcggaggcgccat

SEQ ID NO: 4644 - DNA, 21 bp, Homo sapiens
gccgtcggggccaaaggagac

SEQ ID NO: 4645 - DNA, 17 bp, Homo sapiens
gccgtcgggtaaggtcc

SEQ ID NO: 4646 - DNA, 17 bp, Homo sapiens
gccgtctagggcccctg

SEQ ID NO: 4647 - DNA, 18 bp, Homo sapiens
gccgtctctggagagcag

SEQ ID NO: 4648 - DNA, 22 bp, Homo sapiens
gccgtgacagagaaactaggcg

SEQ ID NO: 4649 - DNA, 18 bp, Homo sapiens
gccgtgagacagcaagtg

SEQ ID NO: 4650 - DNA, 17 bp, Homo sapiens
gccgtgaggagagcggc

SEQ ID NO: 4651 - DNA, 17 bp, Homo sapiens
gccgtgatggcggacgc

SEQ ID NO: 4652 - DNA, 19 bp, Homo sapiens
gccgtgcagagaggcggaa

SEQ ID NO: 4653 - DNA, 19 bp, Homo sapiens
gccgtgccattcttaaagg

SEQ ID NO: 4654 - DNA, 19 bp, Homo sapiens
gccgtgccctgtttttcgg

SEQ ID NO: 4655 - DNA, 17 bp, Homo sapiens
gccgtgcggggcggcgg

SEQ ID NO: 4656 - DNA, 17 bp, Homo sapiens
gccgtgctgcttatggc

SEQ ID NO: 4657 - DNA, 15 bp, Homo sapiens
gccgtggcggctggt

SEQ ID NO: 4658 - DNA, 18 bp, Homo sapiens
gccgtggctaaggctgct

SEQ ID NO: 4659 - DNA, 20 bp, Homo sapiens
gccgtgggaagatggcggac

SEQ ID NO: 4660 - DNA, 17 bp, Homo sapiens
gccgtgggcggcggcca

SEQ ID NO: 4661 - DNA, 17 bp, Homo sapiens
gccgtggtcgctggagc

SEQ ID NO: 4662 - DNA, 18 bp, Homo sapiens
gccgtggtcgctggagct

SEQ ID NO: 4663 - DNA, 19 bp, Homo sapiens
gccgtgttggtggtctgaa

SEQ ID NO: 4664 - DNA, 19 bp, Homo sapiens
gccgtgtttcctctttcgg

SEQ ID NO: 4665 - DNA, 18 bp, Homo sapiens
gccgttctctcggacctg

SEQ ID NO: 4666 - DNA, 16 bp, Homo sapiens
gccgtttttgctcaga

SEQ ID NO: 4667 - DNA, 19 bp, Homo sapiens
gcctaactttgttcacttg

SEQ ID NO: 4668 - DNA, 22 bp, Homo sapiens
gcctaagtttcttttagtttcc

SEQ ID NO: 4669 - DNA, 17 bp, Homo sapiens
aggcaagcgcgcgcctc

SEQ ID NO: 4670 - DNA, 18 bp, Homo sapiens
aggcaagcgttggttctg

SEQ ID NO: 4671 - DNA, 21 bp, Homo sapiens
aggcaagggcaggagtgaagg

SEQ ID NO: 4672 - DNA, 18 bp, Homo sapiens
aggcaagggcttgggggg

SEQ ID NO: 4673 - DNA, 20 bp, Homo sapiens
aggcaagtcggtgaaggacg

SEQ ID NO: 4674 - DNA, 19 bp, Homo sapiens
aggcacaagcaagggctgc

SEQ ID NO: 4675 - DNA, 19 bp, Homo sapiens
aggcacagcggctgagact

SEQ ID NO: 4676 - DNA, 21 bp, Homo sapiens
aggcacagcggctgagactcg

SEQ ID NO: 4677 - DNA, 18 bp, Homo sapiens
aggcacaggctgaatctg

SEQ ID NO: 4678 - DNA, 18 bp, Homo sapiens
aggcacagtgggcgggta

SEQ ID NO: 4679 - DNA, 18 bp, Homo sapiens
aggcacattggcggccag

SEQ ID NO: 4680 - DNA, 18 bp, Homo sapiens
aggcaccgcccaggcctc

SEQ ID NO: 4681 - DNA, 18 bp, Homo sapiens
aggcacgtagctcagcgg

SEQ ID NO: 4682 - DNA, 16 bp, Homo sapiens
aggcactagggatcgt

SEQ ID NO: 4683 - DNA, 18 bp, Homo sapiens
aggcactagggatcgtcc

SEQ ID NO: 4684 - DNA, 17 bp, Homo sapiens
aggcactcagggttagg

SEQ ID NO: 4685 - DNA, 21 bp, Homo sapiens
aggcactctgcttctgccctt

SEQ ID NO: 4686 - DNA, 18 bp, Homo sapiens
aggcactgagcgtatcat

SEQ ID NO: 4687 - DNA, 19 bp, Homo sapiens
aggcactgagcgtatcatg

SEQ ID NO: 4688 - DNA, 17 bp, Homo sapiens
aggcactggaggagcgg

SEQ ID NO: 4689 - DNA, 18 bp, Homo sapiens
aggcactgtaagggcggc

SEQ ID NO: 4690 - DNA, 18 bp, Homo sapiens
aggcagacaggaagactt

SEQ ID NO: 4691 - DNA, 19 bp, Homo sapiens
aggcagacaggaagacttc

SEQ ID NO: 4692 - DNA, 18 bp, Homo sapiens
aggcagacaggtactgac

SEQ ID NO: 4693 - DNA, 23 bp, Homo sapiens
aggcagacgcatcccgaactcgc

SEQ ID NO: 4694 - DNA, 19 bp, Homo sapiens
aggcagacggacaggctga

SEQ ID NO: 4695 - DNA, 18 bp, Homo sapiens
aggcagagaaggggaccg

SEQ ID NO: 4696 - DNA, 18 bp, Homo sapiens
aggcagagactgaacagc

SEQ ID NO: 4697 - DNA, 21 bp, Homo sapiens
aggcagagagcggacctggcg

SEQ ID NO: 4698 - DNA, 22 bp, Homo sapiens
aggcagaggaggcgggagagtg

SEQ ID NO: 4699 - DNA, 17 bp, Homo sapiens
aggcagatgtggcgcta

SEQ ID NO: 4700 - DNA, 19 bp, Homo sapiens
aggcagcaaggggaacccg

SEQ ID NO: 4701 - DNA, 19 bp, Homo sapiens
aggcagcagcggtagaggc

SEQ ID NO: 4702 - DNA, 18 bp, Homo sapiens
aggcagccggagatactc

SEQ ID NO: 4703 - DNA, 18 bp, Homo sapiens
aggcagcgaactcatctt

SEQ ID NO: 4704 - DNA, 20 bp, Homo sapiens
aggcagcgaggctcgggaag

SEQ ID NO: 4705 - DNA, 18 bp, Homo sapiens
aggcagcgatggcggccg

SEQ ID NO: 4706 - DNA, 18 bp, Homo sapiens
aggcagcgcgagggcagc

SEQ ID NO: 4707 - DNA, 18 bp, Homo sapiens
aggcagcgcggccgccga

SEQ ID NO: 4708 - DNA, 17 bp, Homo sapiens
aggcagcggtagcccag

SEQ ID NO: 4709 - DNA, 21 bp, Homo sapiens
aggcagcggttggaggcgcgg

SEQ ID NO: 4710 - DNA, 17 bp, Homo sapiens
aggcagcgttgggccca

SEQ ID NO: 4711 - DNA, 17 bp, Homo sapiens
aggcagctcgagcccag

SEQ ID NO: 4712 - DNA, 23 bp, Homo sapiens
aggcagctggggaggtccgagcg

SEQ ID NO: 4713 - DNA, 18 bp, Homo sapiens
aggcaggaggacaccgag

SEQ ID NO: 4714 - DNA, 21 bp, Homo sapiens
aggcaggcgctcgctgaggca

SEQ ID NO: 4715 - DNA, 19 bp, Homo sapiens
aggcaggttggagccgctg

SEQ ID NO: 4716 - DNA, 23 bp, Homo sapiens
aggcagtagaggccgctatggcg

SEQ ID NO: 4717 - DNA, 18 bp, Homo sapiens
aggcagtagtcctggcag

SEQ ID NO: 4718 - DNA, 23 bp, Homo sapiens
aggcagtagtcctggcagcggca

SEQ ID NO: 4719 - DNA, 18 bp, Homo sapiens
aggcagtgacactgagcg

SEQ ID NO: 4720 - DNA, 22 bp, Homo sapiens
aggcagtggggtttgagattgg

SEQ ID NO: 4721 - DNA, 16 bp, Homo sapiens
aggcagttgactgccc

SEQ ID NO: 4722 - DNA, 17 bp, Homo sapiens
aggcagttggaagatgg

SEQ ID NO: 4723 - DNA, 18 bp, Homo sapiens
aggcatgagcgccctgcc

SEQ ID NO: 4724 - DNA, 20 bp, Homo sapiens
aggcatggcggcggctatgc

SEQ ID NO: 4725 - DNA, 17 bp, Homo sapiens
aggcatggcgggagctc

SEQ ID NO: 4726 - DNA, 17 bp, Homo sapiens
gcctaatgagcggacgg

SEQ ID NO: 4727 - DNA, 17 bp, Homo sapiens
gcctaccgctgctgccg

SEQ ID NO: 4728 - DNA, 18 bp, Homo sapiens
gcctactcttacgacatg

SEQ ID NO: 4729 - DNA, 20 bp, Homo sapiens
gcctagaactccaaggagaa

SEQ ID NO: 4730 - DNA, 19 bp, Homo sapiens
gcctagagctggagactag

SEQ ID NO: 4731 - DNA, 18 bp, Homo sapiens
gcctaggggctgtagagg

SEQ ID NO: 4732 - DNA, 19 bp, Homo sapiens
gcctaggggctgtagaggt

SEQ ID NO: 4733 - DNA, 18 bp, Homo sapiens
gcctagtcagttctgcgt

SEQ ID NO: 4734 - DNA, 17 bp, Homo sapiens
gcctcacaacctgggaa

SEQ ID NO: 4735 - DNA, 18 bp, Homo sapiens
gcctcactcgcagctgcc

SEQ ID NO: 4736 - DNA, 18 bp, Homo sapiens
gcctcagcagctgcggga

SEQ ID NO: 4737 - DNA, 19 bp, Homo sapiens
gcctcagcagctgcgggag

SEQ ID NO: 4738 - DNA, 18 bp, Homo sapiens
gcctccaagggttcttaa

SEQ ID NO: 4739 - DNA, 18 bp, Homo sapiens
gcctccctctcccagcca

SEQ ID NO: 4740 - DNA, 20 bp, Homo sapiens
gcctccctctcccagccaaa

SEQ ID NO: 4741 - DNA, 19 bp, Homo sapiens
gcctccgactcggaacggc

SEQ ID NO: 4742 - DNA, 18 bp, Homo sapiens
gcctccggaggcggcctg

SEQ ID NO: 4743 - DNA, 20 bp, Homo sapiens
gcctcgcttggacgcagagc

SEQ ID NO: 4744 - DNA, 19 bp, Homo sapiens
gcctcggagggtgagcgtc

SEQ ID NO: 4745 - DNA, 20 bp, Homo sapiens
gcctcggctgccggaagggc

SEQ ID NO: 4746 - DNA, 18 bp, Homo sapiens
gcctcggggaaagggaag

SEQ ID NO: 4747 - DNA, 18 bp, Homo sapiens
gcctctagtggatgagaa

SEQ ID NO: 4748 - DNA, 18 bp, Homo sapiens
gcctctgacgcttcactg

SEQ ID NO: 4749 - DNA, 22 bp, Homo sapiens
gcctctgacgcttcactggacc

SEQ ID NO: 4750 - DNA, 18 bp, Homo sapiens
gcctctgcgaatggacgg

SEQ ID NO: 4751 - DNA, 22 bp, Homo sapiens
gcctctggcaggaaaatgagct

SEQ ID NO: 4752 - DNA, 18 bp, Homo sapiens
gcctctggccccgccccg

SEQ ID NO: 4753 - DNA, 18 bp, Homo sapiens
gcctctggtggcggtcgg

SEQ ID NO: 4754 - DNA, 18 bp, Homo sapiens
gcctcttcagttgtctgc

SEQ ID NO: 4755 - DNA, 18 bp, Homo sapiens
gcctgaaccgagccctgc

SEQ ID NO: 4756 - DNA, 17 bp, Homo sapiens
gcctgaagcggagacta

SEQ ID NO: 4757 - DNA, 17 bp, Homo sapiens
gcctgactgagaagagg

SEQ ID NO: 4758 - DNA, 18 bp, Homo sapiens
gcctgactgagaagagga

SEQ ID NO: 4759 - DNA, 20 bp, Homo sapiens
gcctgagccagcgaaatccg

SEQ ID NO: 4760 - DNA, 17 bp, Homo sapiens
gcctgagccatgggccg

SEQ ID NO: 4761 - DNA, 18 bp, Homo sapiens
gcctgagccgggaagcag

SEQ ID NO: 4762 - DNA, 18 bp, Homo sapiens
gcctgagcctgggccggg

SEQ ID NO: 4763 - DNA, 18 bp, Homo sapiens
gcctgagcgtcgagactc

SEQ ID NO: 4764 - DNA, 20 bp, Homo sapiens
gcctgagctgcagaggattc

SEQ ID NO: 4765 - DNA, 18 bp, Homo sapiens
gcctgaggaccggcaaca

SEQ ID NO: 4766 - DNA, 19 bp, Homo sapiens
gcctgaggcgaacaatggc

SEQ ID NO: 4767 - DNA, 21 bp, Homo sapiens
gcctgagttgccgctcggcgc

SEQ ID NO: 4768 - DNA, 23 bp, Homo sapiens
gcctgatccgtgccgcccgccgc

SEQ ID NO: 4769 - DNA, 18 bp, Homo sapiens
gcctgcagcgcctcagca

SEQ ID NO: 4770 - DNA, 18 bp, Homo sapiens
gcctgcccggctgttggg

SEQ ID NO: 4771 - DNA, 19 bp, Homo sapiens
gcctgccctgctccaggct

SEQ ID NO: 4772 - DNA, 17 bp, Homo sapiens
gcctgccgcagggatgg

SEQ ID NO: 4773 - DNA, 19 bp, Homo sapiens
gcctgccgccgccggagcc

SEQ ID NO: 4774 - DNA, 18 bp, Homo sapiens
gcctgcctgccggctctc

SEQ ID NO: 4775 - DNA, 21 bp, Homo sapiens
gcctgcgagcagagcctcctg

SEQ ID NO: 4776 - DNA, 18 bp, Homo sapiens
gcctgcgcaccgcgtctc

SEQ ID NO: 4777 - DNA, 24 bp, Homo sapiens
gcctgcgcagtaagtaagcctgcc

SEQ ID NO: 4778 - DNA, 18 bp, Homo sapiens
gcctgcgcgcggctacag

SEQ ID NO: 4779 - DNA, 17 bp, Homo sapiens
gcctgcgggacggcggc

SEQ ID NO: 4780 - DNA, 16 bp, Homo sapiens
gcctgcgggagcggcc

SEQ ID NO: 4781 - DNA, 17 bp, Homo sapiens
gcctgcgggcccagtga

SEQ ID NO: 4782 - DNA, 23 bp, Homo sapiens
gcctgcgggctgagagcgtcgag

SEQ ID NO: 4783 - DNA, 18 bp, Homo sapiens
aggcatggcgggagctcc

SEQ ID NO: 4784 - DNA, 18 bp, Homo sapiens
aggcattgaggcagccag

SEQ ID NO: 4785 - DNA, 19 bp, Homo sapiens
aggcattgaggcagccagc

SEQ ID NO: 4786 - DNA, 16 bp, Homo sapiens
aggccacaggtcgttt

SEQ ID NO: 4787 - DNA, 18 bp, Homo sapiens
aggccagcctcggagcca

SEQ ID NO: 4788 - DNA, 19 bp, Homo sapiens
aggccagcctcggagccag

SEQ ID NO: 4789 - DNA, 21 bp, Homo sapiens
aggccagcctcggagccagca

SEQ ID NO: 4790 - DNA, 21 bp, Homo sapiens
aggccagggaggaagatgtcg

SEQ ID NO: 4791 - DNA, 17 bp, Homo sapiens
aggccaggtgaggggcg

SEQ ID NO: 4792 - DNA, 18 bp, Homo sapiens
aggccaggtgtgtgcgtc

SEQ ID NO: 4793 - DNA, 21 bp, Homo sapiens
aggcccagaacagagtcagag

SEQ ID NO: 4794 - DNA, 19 bp, Homo sapiens
aggccccgccggccgggct

SEQ ID NO: 4795 - DNA, 18 bp, Homo sapiens
aggccccggacaggaggc

SEQ ID NO: 4796 - DNA, 18 bp, Homo sapiens
aggccccgggcggctcta

SEQ ID NO: 4797 - DNA, 21 bp, Homo sapiens
aggcccgagcccaccgcgccg

SEQ ID NO: 4798 - DNA, 16 bp, Homo sapiens
aggcccgcggaaaacg

SEQ ID NO: 4799 - DNA, 19 bp, Homo sapiens
aggcccgggagagcggcgc

SEQ ID NO: 4800 - DNA, 17 bp, Homo sapiens
aggcccttcgggacgag

SEQ ID NO: 4801 - DNA, 23 bp, Homo sapiens
aggccgaggccaagatggcggtg

SEQ ID NO: 4802 - DNA, 22 bp, Homo sapiens
aggccgagggagaagttagaaa

SEQ ID NO: 4803 - DNA, 19 bp, Homo sapiens
aggccgcaaccaggcccgc

SEQ ID NO: 4804 - DNA, 22 bp, Homo sapiens
aggccgccctcggagagctctg

SEQ ID NO: 4805 - DNA, 18 bp, Homo sapiens
aggccgcctgcccgcctc

SEQ ID NO: 4806 - DNA, 16 bp, Homo sapiens
aggccgcggacctgac

SEQ ID NO: 4807 - DNA, 20 bp, Homo sapiens
aggccgcggacggcggagcg

SEQ ID NO: 4808 - DNA, 19 bp, Homo sapiens
aggccgcggagccggactg

SEQ ID NO: 4809 - DNA, 17 bp, Homo sapiens
aggccgcggagggagag

SEQ ID NO: 4810 - DNA, 20 bp, Homo sapiens
aggccgcggcatggggcgag

SEQ ID NO: 4811 - DNA, 17 bp, Homo sapiens
aggccgcgggagcctgc

SEQ ID NO: 4812 - DNA, 19 bp, Homo sapiens
aggccgcgggagcctgcag

SEQ ID NO: 4813 - DNA, 21 bp, Homo sapiens
aggccgcggggggaacccggc

SEQ ID NO: 4814 - DNA, 17 bp, Homo sapiens
aggccgggaacacgagg

SEQ ID NO: 4815 - DNA, 18 bp, Homo sapiens
aggccgggaacacgaggc

SEQ ID NO: 4816 - DNA, 19 bp, Homo sapiens
aggccgggacacggtaagt

SEQ ID NO: 4817 - DNA, 19 bp, Homo sapiens
aggccgggagagggagaac

SEQ ID NO: 4818 - DNA, 18 bp, Homo sapiens
aggccgggagctcgagag

SEQ ID NO: 4819 - DNA, 19 bp, Homo sapiens
aggccgggcgcacccagcc

SEQ ID NO: 4820 - DNA, 19 bp, Homo sapiens
aggccggggacgggagctg

SEQ ID NO: 4821 - DNA, 18 bp, Homo sapiens
aggccggggtttggctcg

SEQ ID NO: 4822 - DNA, 18 bp, Homo sapiens
aggccggtcgcgggcgca

SEQ ID NO: 4823 - DNA, 20 bp, Homo sapiens
aggccgtaggaggaagatgg

SEQ ID NO: 4824 - DNA, 20 bp, Homo sapiens
aggccgtgccccacatccag

SEQ ID NO: 4825 - DNA, 18 bp, Homo sapiens
aggccgtggagcgcactg

SEQ ID NO: 4826 - DNA, 18 bp, Homo sapiens
aggcctcagcggtggccg

SEQ ID NO: 4827 - DNA, 21 bp, Homo sapiens
aggcctcccgccaccgctgct

SEQ ID NO: 4828 - DNA, 19 bp, Homo sapiens
aggcctcgaacgggatggc

SEQ ID NO: 4829 - DNA, 18 bp, Homo sapiens
aggcctgagagcgacatg

SEQ ID NO: 4830 - DNA, 19 bp, Homo sapiens
aggcctgctgggaagtgta

SEQ ID NO: 4831 - DNA, 19 bp, Homo sapiens
aggcctggaggacaccaac

SEQ ID NO: 4832 - DNA, 19 bp, Homo sapiens
aggcctggggttttctgtg

SEQ ID NO: 4833 - DNA, 18 bp, Homo sapiens
aggcctgtgacgaaggtg

SEQ ID NO: 4834 - DNA, 19 bp, Homo sapiens
aggcctgtgacgaaggtgc

SEQ ID NO: 4835 - DNA, 18 bp, Homo sapiens
aggcctgtgtcgggtaga

SEQ ID NO: 4836 - DNA, 18 bp, Homo sapiens
aggcgaacgaacgggcgg

SEQ ID NO: 4837 - DNA, 17 bp, Homo sapiens
aggcgaagactaaggcg

SEQ ID NO: 4838 - DNA, 18 bp, Homo sapiens
aggcgaagcgtccacggg

SEQ ID NO: 4839 - DNA, 18 bp, Homo sapiens
aggcgaagctggaatctg

SEQ ID NO: 4840 - DNA, 17 bp, Homo sapiens
gcctgctacgagtagaa

SEQ ID NO: 4841 - DNA, 19 bp, Homo sapiens
gcctgctacgagtagaacg

SEQ ID NO: 4842 - DNA, 20 bp, Homo sapiens
gcctgctacgagtagaacgc

SEQ ID NO: 4843 - DNA, 18 bp, Homo sapiens
gcctgctgctgaggaggc

SEQ ID NO: 4844 - DNA, 19 bp, Homo sapiens
gcctgctgggcgggctgaa

SEQ ID NO: 4845 - DNA, 18 bp, Homo sapiens
gcctggaaggcgggcggc

SEQ ID NO: 4846 - DNA, 18 bp, Homo sapiens
gcctggaccttgcagccg

SEQ ID NO: 4847 - DNA, 18 bp, Homo sapiens
gcctggacgggagcaagg

SEQ ID NO: 4848 - DNA, 17 bp, Homo sapiens
gcctggagcgcgcgggc

SEQ ID NO: 4849 - DNA, 18 bp, Homo sapiens
gcctggaggacaccaaca

SEQ ID NO: 4850 - DNA, 21 bp, Homo sapiens
gcctggaggatggcggacgcc

SEQ ID NO: 4851 - DNA, 18 bp, Homo sapiens
gcctggagtccgctcggc

SEQ ID NO: 4852 - DNA, 18 bp, Homo sapiens
gcctggccagacagagtg

SEQ ID NO: 4853 - DNA, 22 bp, Homo sapiens
gcctggccgggcgtagacgcgg

SEQ ID NO: 4854 - DNA, 18 bp, Homo sapiens
gcctggcggctggacggg

SEQ ID NO: 4855 - DNA, 20 bp, Homo sapiens
gcctgggcggagagcagagg

SEQ ID NO: 4856 - DNA, 18 bp, Homo sapiens
gcctgggctgccggacgg

SEQ ID NO: 4857 - DNA, 18 bp, Homo sapiens
gcctgggctggacgtggt

SEQ ID NO: 4858 - DNA, 15 bp, Homo sapiens
gcctggggcggaaaa

SEQ ID NO: 4859 - DNA, 19 bp, Homo sapiens
gcctggtgagaaattgaga

SEQ ID NO: 4860 - DNA, 18 bp, Homo sapiens
gcctggtgcgtcgcggcg

SEQ ID NO: 4861 - DNA, 19 bp, Homo sapiens
gcctgtcggctacggttcc

SEQ ID NO: 4862 - DNA, 18 bp, Homo sapiens
gcctgtcggctgacgtgt

SEQ ID NO: 4863 - DNA, 18 bp, Homo sapiens
gcctgtgactacaaagag

SEQ ID NO: 4864 - DNA, 18 bp, Homo sapiens
gcctgtgcagctcgggtt

SEQ ID NO: 4865 - DNA, 17 bp, Homo sapiens
gcctgtggaggtggact

SEQ ID NO: 4866 - DNA, 18 bp, Homo sapiens
gcctgtggggccggtgac

SEQ ID NO: 4867 - DNA, 20 bp, Homo sapiens
gcctgtttgagaagcagcgg

SEQ ID NO: 4868 - DNA, 21 bp, Homo sapiens
gccttaaattcggtgagacgc

SEQ ID NO: 4869 - DNA, 20 bp, Homo sapiens
gccttaggcggagcgaagag

SEQ ID NO: 4870 - DNA, 21 bp, Homo sapiens
gccttcagccggggcttcggg

SEQ ID NO: 4871 - DNA, 17 bp, Homo sapiens
gccttccccgcgagcgg

SEQ ID NO: 4872 - DNA, 19 bp, Homo sapiens
gccttcctagtggagacgc

SEQ ID NO: 4873 - DNA, 18 bp, Homo sapiens
gccttcggatgtggcgga

SEQ ID NO: 4874 - DNA, 16 bp, Homo sapiens
gccttctcacactttc

SEQ ID NO: 4875 - DNA, 19 bp, Homo sapiens
gccttctcacactttcagg

SEQ ID NO: 4876 - DNA, 20 bp, Homo sapiens
gccttctcacactttcaggc

SEQ ID NO: 4877 - DNA, 21 bp, Homo sapiens
gccttctcgggctggggccgc

SEQ ID NO: 4878 - DNA, 18 bp, Homo sapiens
gccttgagcgaggaggag

SEQ ID NO: 4879 - DNA, 18 bp, Homo sapiens
gccttgcattgttggcgg

SEQ ID NO: 4880 - DNA, 21 bp, Homo sapiens
gccttgtgggatggcggagtt

SEQ ID NO: 4881 - DNA, 20 bp, Homo sapiens
gcctttacgcagcttgcttt

SEQ ID NO: 4882 - DNA, 18 bp, Homo sapiens
gcctttcccttgacacgg

SEQ ID NO: 4883 - DNA, 18 bp, Homo sapiens
gcctttcgggcggtggct

SEQ ID NO: 4884 - DNA, 18 bp, Homo sapiens
gcctttgatcgtcttcct

SEQ ID NO: 4885 - DNA, 19 bp, Homo sapiens
gcctttgcgcatgtgcaga

SEQ ID NO: 4886 - DNA, 17 bp, Homo sapiens
gcctttggcccgagggc

SEQ ID NO: 4887 - DNA, 19 bp, Homo sapiens
gccttttgccccggaagta

SEQ ID NO: 4888 - DNA, 15 bp, Homo sapiens
gccttttgtgcgggc

SEQ ID NO: 4889 - DNA, 19 bp, Homo sapiens
gcgaaactccgcggagcgc

SEQ ID NO: 4890 - DNA, 19 bp, Homo sapiens
gcgaaatgtagcgagccgg

SEQ ID NO: 4891 - DNA, 17 bp, Homo sapiens
gcgaacaggccggacgc

SEQ ID NO: 4892 - DNA, 17 bp, Homo sapiens
gcgaacatggcagcaga

SEQ ID NO: 4893 - DNA, 19 bp, Homo sapiens
gcgaaccgggccaggggaa

SEQ ID NO: 4894 - DNA, 18 bp, Homo sapiens
gcgaacggcagctaggag

SEQ ID NO: 4895 - DNA, 19 bp, Homo sapiens
gcgaacgttccgtgggcag

SEQ ID NO: 4896 - DNA, 17 bp, Homo sapiens
gcgaactgcgggtggac

SEQ ID NO: 4897 - DNA, 22 bp, Homo sapiens
aggcgacaagagaagaaggagg

SEQ ID NO: 4898 - DNA, 19 bp, Homo sapiens
aggcgacacgccggcgggc

SEQ ID NO: 4899 - DNA, 18 bp, Homo sapiens
aggcgacaggccgctgac

SEQ ID NO: 4900 - DNA, 15 bp, Homo sapiens
aggcgacgccggcgc

SEQ ID NO: 4901 - DNA, 17 bp, Homo sapiens
aggcgacgcggagaggg

SEQ ID NO: 4902 - DNA, 19 bp, Homo sapiens
aggcgacggaatggaggag

SEQ ID NO: 4903 - DNA, 20 bp, Homo sapiens
aggcgacggaatggaggagg

SEQ ID NO: 4904 - DNA, 17 bp, Homo sapiens
aggcgacggggtagggg

SEQ ID NO: 4905 - DNA, 18 bp, Homo sapiens
aggcgagagcggagctcc

SEQ ID NO: 4906 - DNA, 20 bp, Homo sapiens
aggcgagagcggagctccaa

SEQ ID NO: 4907 - DNA, 17 bp, Homo sapiens
aggcgagagctgcgaag

SEQ ID NO: 4908 - DNA, 18 bp, Homo sapiens
aggcgagcagggcaggcg

SEQ ID NO: 4909 - DNA, 19 bp, Homo sapiens
aggcgagccggacgccgct

SEQ ID NO: 4910 - DNA, 19 bp, Homo sapiens
aggcgagcgtgagcccagc

SEQ ID NO: 4911 - DNA, 19 bp, Homo sapiens
aggcgaggagtgggtagca

SEQ ID NO: 4912 - DNA, 19 bp, Homo sapiens
aggcgaggccgcgtcgctc

SEQ ID NO: 4913 - DNA, 19 bp, Homo sapiens
aggcgaggtccggggagcg

SEQ ID NO: 4914 - DNA, 18 bp, Homo sapiens
aggcgagtgggaagggac

SEQ ID NO: 4915 - DNA, 19 bp, Homo sapiens
aggcgatcagcgggacttc

SEQ ID NO: 4916 - DNA, 20 bp, Homo sapiens
aggcgatcagcgggacttcc

SEQ ID NO: 4917 - DNA, 22 bp, Homo sapiens
aggcgcacgagggaggaacgcg

SEQ ID NO: 4918 - DNA, 19 bp, Homo sapiens
aggcgcaggagccctgggg

SEQ ID NO: 4919 - DNA, 21 bp, Homo sapiens
aggcgccacgtgggattcggc

SEQ ID NO: 4920 - DNA, 18 bp, Homo sapiens
aggcgcccaagccgccgc

SEQ ID NO: 4921 - DNA, 19 bp, Homo sapiens
aggcgcccaagccgccgcc

SEQ ID NO: 4922 - DNA, 23 bp, Homo sapiens
aggcgccgggtgaggcgtgcggc

SEQ ID NO: 4923 - DNA, 18 bp, Homo sapiens
aggcgcctcaccagcctc

SEQ ID NO: 4924 - DNA, 18 bp, Homo sapiens
aggcgcctgatgagttca

SEQ ID NO: 4925 - DNA, 20 bp, Homo sapiens
aggcgcgagtgaggaaagga

SEQ ID NO: 4926 - DNA, 20 bp, Homo sapiens
aggcgcgcgcggaggccgcg

SEQ ID NO: 4927 - DNA, 18 bp, Homo sapiens
aggcgcggaaggaagcag

SEQ ID NO: 4928 - DNA, 20 bp, Homo sapiens
aggcgcggaccaaagcgatc

SEQ ID NO: 4929 - DNA, 17 bp, Homo sapiens
aggcgcgggggcgcgtc

SEQ ID NO: 4930 - DNA, 19 bp, Homo sapiens
aggcgcgggggttggggaa

SEQ ID NO: 4931 - DNA, 15 bp, Homo sapiens
aggcgcggggtcgcc

SEQ ID NO: 4932 - DNA, 18 bp, Homo sapiens
aggcgcggtgggtgtctg

SEQ ID NO: 4933 - DNA, 18 bp, Homo sapiens
aggcgcgtagagagccgc

SEQ ID NO: 4934 - DNA, 16 bp, Homo sapiens
aggcgcgtgtcggcct

SEQ ID NO: 4935 - DNA, 18 bp, Homo sapiens
aggcgctaggaagaggcc

SEQ ID NO: 4936 - DNA, 19 bp, Homo sapiens
aggcgctgctgacaccgcc

SEQ ID NO: 4937 - DNA, 18 bp, Homo sapiens
aggcgctgtcatggagga

SEQ ID NO: 4938 - DNA, 19 bp, Homo sapiens
aggcgctgtcatggaggac

SEQ ID NO: 4939 - DNA, 22 bp, Homo sapiens
aggcgctgtcatggaggacgcc

SEQ ID NO: 4940 - DNA, 16 bp, Homo sapiens
aggcgcttcaggacta

SEQ ID NO: 4941 - DNA, 17 bp, Homo sapiens
aggcgcttcaggactac

SEQ ID NO: 4942 - DNA, 20 bp, Homo sapiens
aggcgcttcaggactaccgc

SEQ ID NO: 4943 - DNA, 19 bp, Homo sapiens
aggcgcttccgcggcgact

SEQ ID NO: 4944 - DNA, 18 bp, Homo sapiens
aggcgcttcgggagccgc

SEQ ID NO: 4945 - DNA, 20 bp, Homo sapiens
aggcggaaagggactgggta

SEQ ID NO: 4946 - DNA, 20 bp, Homo sapiens
aggcggaagtaggagaggag

SEQ ID NO: 4947 - DNA, 18 bp, Homo sapiens
aggcggaccgcagtcgag

SEQ ID NO: 4948 - DNA, 18 bp, Homo sapiens
aggcggagactagagcgg

SEQ ID NO: 4949 - DNA, 18 bp, Homo sapiens
aggcggagccacctcgca

SEQ ID NO: 4950 - DNA, 21 bp, Homo sapiens
aggcggagcgaagagaaccgg

SEQ ID NO: 4951 - DNA, 17 bp, Homo sapiens
aggcggagcggcggatc

SEQ ID NO: 4952 - DNA, 18 bp, Homo sapiens
aggcggagcggcggatct

SEQ ID NO: 4953 - DNA, 19 bp, Homo sapiens
aggcggagcggcggatctg

SEQ ID NO: 4954 - DNA, 18 bp, Homo sapiens
gcgaacttttacgcgctg

SEQ ID NO: 4955 - DNA, 18 bp, Homo sapiens
gcgaagaaggaaggtgtg

SEQ ID NO: 4956 - DNA, 20 bp, Homo sapiens
gcgaagaaggaaggtgtgtg

SEQ ID NO: 4957 - DNA, 21 bp, Homo sapiens
gcgaagagctcggaccaagcg

SEQ ID NO: 4958 - DNA, 18 bp, Homo sapiens
gcgaagcggctggcggag

SEQ ID NO: 4959 - DNA, 18 bp, Homo sapiens
gcgaagcgggcgagcggt

SEQ ID NO: 4960 - DNA, 19 bp, Homo sapiens
gcgaagcgggcgagcggtg

SEQ ID NO: 4961 - DNA, 18 bp, Homo sapiens
gcgaaggaagtgctggag

SEQ ID NO: 4962 - DNA, 20 bp, Homo sapiens
gcgaagggaggtgagcgttc

SEQ ID NO: 4963 - DNA, 17 bp, Homo sapiens
gcgaaggtggctcgccg

SEQ ID NO: 4964 - DNA, 18 bp, Homo sapiens
gcgaatggagcaggggcg

SEQ ID NO: 4965 - DNA, 21 bp, Homo sapiens
gcgacaaaatggctgcccgag

SEQ ID NO: 4966 - DNA, 22 bp, Homo sapiens
gcgacaaaatggctgcccgagg

SEQ ID NO: 4967 - DNA, 19 bp, Homo sapiens
gcgacacacgctctcgccg

SEQ ID NO: 4968 - DNA, 17 bp, Homo sapiens
gcgacacgccggcgggc

SEQ ID NO: 4969 - DNA, 17 bp, Homo sapiens
gcgacagcggtccggac

SEQ ID NO: 4970 - DNA, 18 bp, Homo sapiens
gcgacaggaccgggagag

SEQ ID NO: 4971 - DNA, 19 bp, Homo sapiens
gcgacatgggggggcgcgg

SEQ ID NO: 4972 - DNA, 20 bp, Homo sapiens
gcgacattagctagcgctcg

SEQ ID NO: 4973 - DNA, 18 bp, Homo sapiens
gcgaccagagcagggtcg

SEQ ID NO: 4974 - DNA, 19 bp, Homo sapiens
gcgaccatcacgcacctcc

SEQ ID NO: 4975 - DNA, 18 bp, Homo sapiens
gcgacccagacggggaaa

SEQ ID NO: 4976 - DNA, 17 bp, Homo sapiens
gcgaccgaagcagggcg

SEQ ID NO: 4977 - DNA, 21 bp, Homo sapiens
gcgaccgaagcagggcgcgca

SEQ ID NO: 4978 - DNA, 21 bp, Homo sapiens
gcgacgacggcgacactttgc

SEQ ID NO: 4979 - DNA, 17 bp, Homo sapiens
gcgacgaggtggccgag

SEQ ID NO: 4980 - DNA, 20 bp, Homo sapiens
gcgacggacgcaagatggcg

SEQ ID NO: 4981 - DNA, 24 bp, Homo sapiens
gcgacggagcccggtggacggaag

SEQ ID NO: 4982 - DNA, 18 bp, Homo sapiens
gcgacggaggaggaggat

SEQ ID NO: 4983 - DNA, 18 bp, Homo sapiens
gcgacggcggcaggagcg

SEQ ID NO: 4984 - DNA, 20 bp, Homo sapiens
gcgacggctggcggcggcgc

SEQ ID NO: 4985 - DNA, 15 bp, Homo sapiens
gcgacgtcgccgcgc

SEQ ID NO: 4986 - DNA, 17 bp, Homo sapiens
gcgactagccgggagac

SEQ ID NO: 4987 - DNA, 18 bp, Homo sapiens
gcgactcgcaggggctgg

SEQ ID NO: 4988 - DNA, 20 bp, Homo sapiens
gcgactgcaggcaaacccgg

SEQ ID NO: 4989 - DNA, 18 bp, Homo sapiens
gcgactgccggaagtgac

SEQ ID NO: 4990 - DNA, 16 bp, Homo sapiens
gcgactgcgcacgcgc

SEQ ID NO: 4991 - DNA, 16 bp, Homo sapiens
gcgactgctgtcggtg

SEQ ID NO: 4992 - DNA, 18 bp, Homo sapiens
gcgactgtggagttagcg

SEQ ID NO: 4993 - DNA, 17 bp, Homo sapiens
gcgactttttgaaagcc

SEQ ID NO: 4994 - DNA, 21 bp, Homo sapiens
gcgagaagagcggcagagcct

SEQ ID NO: 4995 - DNA, 19 bp, Homo sapiens
gcgagaccatggagaacgg

SEQ ID NO: 4996 - DNA, 16 bp, Homo sapiens
gcgagacggccctgag

SEQ ID NO: 4997 - DNA, 22 bp, Homo sapiens
gcgagacttcggcggcgcagca

SEQ ID NO: 4998 - DNA, 17 bp, Homo sapiens
gcgagaggcgggctgag

SEQ ID NO: 4999 - DNA, 18 bp, Homo sapiens
gcgagagggacaggagcg

SEQ ID NO: 5000 - DNA, 18 bp, Homo sapiens
gcgagagtgagtaccagc

SEQ ID NO: 5001 - DNA, 16 bp, Homo sapiens
gcgagatggattccgg

SEQ ID NO: 5002 - DNA, 18 bp, Homo sapiens
gcgagcaggacagaggag

SEQ ID NO: 5003 - DNA, 18 bp, Homo sapiens
gcgagcagggaggcctcc

SEQ ID NO: 5004 - DNA, 18 bp, Homo sapiens
gcgagccaggattcccgg

SEQ ID NO: 5005 - DNA, 18 bp, Homo sapiens
gcgagccgggctacgggg

SEQ ID NO: 5006 - DNA, 18 bp, Homo sapiens
gcgagcgagggaacggcg

SEQ ID NO: 5007 - DNA, 23 bp, Homo sapiens
gcgagcgaggggcagaggcgaga

SEQ ID NO: 5008 - DNA, 18 bp, Homo sapiens
gcgagcgatttagtctga

SEQ ID NO: 5009 - DNA, 18 bp, Homo sapiens
gcgagcgcaacaggctgc

SEQ ID NO: 5010 - DNA, 20 bp, Homo sapiens
gcgagcgccggttgctgttt

SEQ ID NO: 5011 - DNA, 17 bp, Homo sapiens
aggcggaggaaccggtg

SEQ ID NO: 5012 - DNA, 18 bp, Homo sapiens
aggcggaggaaccggtgt

SEQ ID NO: 5013 - DNA, 20 bp, Homo sapiens
aggcggaggagcccggactg

SEQ ID NO: 5014 - DNA, 17 bp, Homo sapiens
aggcggaggatgtattg

SEQ ID NO: 5015 - DNA, 18 bp, Homo sapiens
aggcggaggcagccccgc

SEQ ID NO: 5016 - DNA, 19 bp, Homo sapiens
aggcggaggctgagggcgc

SEQ ID NO: 5017 - DNA, 18 bp, Homo sapiens
aggcggagggagtaatgg

SEQ ID NO: 5018 - DNA, 19 bp, Homo sapiens
aggcggagggagtaatggt

SEQ ID NO: 5019 - DNA, 18 bp, Homo sapiens
aggcggaggtgagtgcgc

SEQ ID NO: 5020 - DNA, 20 bp, Homo sapiens
aggcggaggtgagtgcgcgg

SEQ ID NO: 5021 - DNA, 18 bp, Homo sapiens
aggcggagtaaagggact

SEQ ID NO: 5022 - DNA, 18 bp, Homo sapiens
aggcggatctcagaaggc

SEQ ID NO: 5023 - DNA, 18 bp, Homo sapiens
aggcggcaagcgcagccg

SEQ ID NO: 5024 - DNA, 18 bp, Homo sapiens
aggcggcagcagcaacta

SEQ ID NO: 5025 - DNA, 21 bp, Homo sapiens
aggcggcagcagcaactacgg

SEQ ID NO: 5026 - DNA, 21 bp, Homo sapiens
aggcggcccgcgaggccgagc

SEQ ID NO: 5027 - DNA, 18 bp, Homo sapiens
aggcggccgatttggggc

SEQ ID NO: 5028 - DNA, 17 bp, Homo sapiens
aggcggccgcagcccga

SEQ ID NO: 5029 - DNA, 17 bp, Homo sapiens
aggcggccgccgcgagt

SEQ ID NO: 5030 - DNA, 18 bp, Homo sapiens
aggcggccgtacaatcct

SEQ ID NO: 5031 - DNA, 18 bp, Homo sapiens
aggcggcgagaggcgggc

SEQ ID NO: 5032 - DNA, 19 bp, Homo sapiens
aggcggcgaggcggcagcg

SEQ ID NO: 5033 - DNA, 18 bp, Homo sapiens
aggcggcgagtcccgcgg

SEQ ID NO: 5034 - DNA, 16 bp, Homo sapiens
aggcggcgcgggcggc

SEQ ID NO: 5035 - DNA, 18 bp, Homo sapiens
aggcggcggcaccgtccc

SEQ ID NO: 5036 - DNA, 21 bp, Homo sapiens
aggcggcggcaccgtccccgc

SEQ ID NO: 5037 - DNA, 17 bp, Homo sapiens
aggcggcggcacgacga

SEQ ID NO: 5038 - DNA, 19 bp, Homo sapiens
aggcggcggcacgacgacg

SEQ ID NO: 5039 - DNA, 21 bp, Homo sapiens
aggcggcggcacgacgacggt

SEQ ID NO: 5040 - DNA, 22 bp, Homo sapiens
aggcggcggcggaccgagctgc

SEQ ID NO: 5041 - DNA, 19 bp, Homo sapiens
aggcggcggcggccgcagc

SEQ ID NO: 5042 - DNA, 18 bp, Homo sapiens
aggcggcggctaagaagg

SEQ ID NO: 5043 - DNA, 19 bp, Homo sapiens
aggcggcggctgcagcggg

SEQ ID NO: 5044 - DNA, 17 bp, Homo sapiens
aggcggcgggcgaagcg

SEQ ID NO: 5045 - DNA, 18 bp, Homo sapiens
aggcggcgggcgaagcgc

SEQ ID NO: 5046 - DNA, 19 bp, Homo sapiens
aggcggcgggcgaagcgca

SEQ ID NO: 5047 - DNA, 18 bp, Homo sapiens
aggcggcgggcggagcgg

SEQ ID NO: 5048 - DNA, 19 bp, Homo sapiens
aggcggcgggcggagcggc

SEQ ID NO: 5049 - DNA, 18 bp, Homo sapiens
aggcggcggtggaaaggt

SEQ ID NO: 5050 - DNA, 19 bp, Homo sapiens
aggcggcggttgatcccag

SEQ ID NO: 5051 - DNA, 22 bp, Homo sapiens
aggcggcgtttctgggcgcagc

SEQ ID NO: 5052 - DNA, 18 bp, Homo sapiens
aggcggctgggcctaggg

SEQ ID NO: 5053 - DNA, 16 bp, Homo sapiens
aggcgggagcgcgacc

SEQ ID NO: 5054 - DNA, 17 bp, Homo sapiens
aggcgggcagcagaccg

SEQ ID NO: 5055 - DNA, 16 bp, Homo sapiens
aggcgggccgaagcga

SEQ ID NO: 5056 - DNA, 21 bp, Homo sapiens
aggcgggcgtggacgagccgg

SEQ ID NO: 5057 - DNA, 18 bp, Homo sapiens
aggcgggtgaagggaggt

SEQ ID NO: 5058 - DNA, 18 bp, Homo sapiens
aggcggtagggggtacgg

SEQ ID NO: 5059 - DNA, 16 bp, Homo sapiens
aggcggtcgcttcgag

SEQ ID NO: 5060 - DNA, 18 bp, Homo sapiens
aggcggtgaagtcggtgg

SEQ ID NO: 5061 - DNA, 18 bp, Homo sapiens
aggcggtgctgccgtctg

SEQ ID NO: 5062 - DNA, 18 bp, Homo sapiens
aggcggtggaggaaatgc

SEQ ID NO: 5063 - DNA, 18 bp, Homo sapiens
aggcggtggaggaagagg

SEQ ID NO: 5064 - DNA, 19 bp, Homo sapiens
aggcggttgctcccctgcc

SEQ ID NO: 5065 - DNA, 16 bp, Homo sapiens
aggcggttggtggggt

SEQ ID NO: 5066 - DNA, 20 bp, Homo sapiens
aggcgtccctggaagggaag

SEQ ID NO: 5067 - DNA, 17 bp, Homo sapiens
aggcgtcgggagggcct

SEQ ID NO: 5068 - DNA, 22 bp, Homo sapiens
gcgagcgctctagtgagcgcgg

SEQ ID NO: 5069 - DNA, 19 bp, Homo sapiens
gcgagcgctgtagggagcc

SEQ ID NO: 5070 - DNA, 17 bp, Homo sapiens
gcgagcggagccgcggt

SEQ ID NO: 5071 - DNA, 17 bp, Homo sapiens
gcgagcggaggggctga

SEQ ID NO: 5072 - DNA, 18 bp, Homo sapiens
gcgagcggcagcgggagc

SEQ ID NO: 5073 - DNA, 19 bp, Homo sapiens
gcgagcggcggttagctcc

SEQ ID NO: 5074 - DNA, 18 bp, Homo sapiens
gcgagcgtggacctggga

SEQ ID NO: 5075 - DNA, 21 bp, Homo sapiens
gcgagcgtggacctgggacgg

SEQ ID NO: 5076 - DNA, 18 bp, Homo sapiens
gcgagctcgtcgtactga

SEQ ID NO: 5077 - DNA, 19 bp, Homo sapiens
gcgagctgccatggcccag

SEQ ID NO: 5078 - DNA, 16 bp, Homo sapiens
gcgagctggagagagg

SEQ ID NO: 5079 - DNA, 17 bp, Homo sapiens
gcgagctggagagagga

SEQ ID NO: 5080 - DNA, 18 bp, Homo sapiens
gcgagctggagagaggac

SEQ ID NO: 5081 - DNA, 20 bp, Homo sapiens
gcgagctggagagaggactg

SEQ ID NO: 5082 - DNA, 17 bp, Homo sapiens
gcgagctggaggaaagg

SEQ ID NO: 5083 - DNA, 21 bp, Homo sapiens
gcgaggagcagcgatggacgg

SEQ ID NO: 5084 - DNA, 22 bp, Homo sapiens
gcgaggaggagcgcgcgggctg

SEQ ID NO: 5085 - DNA, 24 bp, Homo sapiens
gcgaggaggtggaggaggaggagg

SEQ ID NO: 5086 - DNA, 18 bp, Homo sapiens
gcgaggagtccgagtgtg

SEQ ID NO: 5087 - DNA, 16 bp, Homo sapiens
gcgaggcagcagtgca

SEQ ID NO: 5088 - DNA, 16 bp, Homo sapiens
gcgaggcctgggcggc

SEQ ID NO: 5089 - DNA, 18 bp, Homo sapiens
gcgaggcggccgagctgg

SEQ ID NO: 5090 - DNA, 18 bp, Homo sapiens
gcgagggaagcggctaga

SEQ ID NO: 5091 - DNA, 19 bp, Homo sapiens
gcgagggcggaagttggat

SEQ ID NO: 5092 - DNA, 18 bp, Homo sapiens
gcgagggcggctgcggcg

SEQ ID NO: 5093 - DNA, 17 bp, Homo sapiens
gcgaggggtgcgcagca

SEQ ID NO: 5094 - DNA, 18 bp, Homo sapiens
gcgaggtctgcgggaggc

SEQ ID NO: 5095 - DNA, 20 bp, Homo sapiens
gcgaggtgacagcctcgctt

SEQ ID NO: 5096 - DNA, 18 bp, Homo sapiens
gcgaggtggagggtggaa

SEQ ID NO: 5097 - DNA, 16 bp, Homo sapiens
gcgaggttctgagcgt

SEQ ID NO: 5098 - DNA, 18 bp, Homo sapiens
gcgagtctgcggccagcc

SEQ ID NO: 5099 - DNA, 18 bp, Homo sapiens
gcgagtgcgtcgagctcg

SEQ ID NO: 5100 - DNA, 18 bp, Homo sapiens
gcgagtggacgtgactgc

SEQ ID NO: 5101 - DNA, 17 bp, Homo sapiens
gcgagtgggaagggact

SEQ ID NO: 5102 - DNA, 18 bp, Homo sapiens
gcgagtgggaagggactc

SEQ ID NO: 5103 - DNA, 18 bp, Homo sapiens
gcgagtgggagcaccagg

SEQ ID NO: 5104 - DNA, 19 bp, Homo sapiens
gcgagtgggagcaccagga

SEQ ID NO: 5105 - DNA, 19 bp, Homo sapiens
gcgagtgggagggctgggc

SEQ ID NO: 5106 - DNA, 22 bp, Homo sapiens
gcgagtgggagggctgggcttc

SEQ ID NO: 5107 - DNA, 18 bp, Homo sapiens
gcgagtgggtcggcaccg

SEQ ID NO: 5108 - DNA, 18 bp, Homo sapiens
gcgagttcagtgccgcca

SEQ ID NO: 5109 - DNA, 21 bp, Homo sapiens
gcgatatggaagatgggcagc

SEQ ID NO: 5110 - DNA, 18 bp, Homo sapiens
gcgatcagatgatcctgt

SEQ ID NO: 5111 - DNA, 16 bp, Homo sapiens
gcgatcgccctgccgg

SEQ ID NO: 5112 - DNA, 18 bp, Homo sapiens
gcgatcgcgctcggaccc

SEQ ID NO: 5113 - DNA, 17 bp, Homo sapiens
gcgatgcggacagggca

SEQ ID NO: 5114 - DNA, 16 bp, Homo sapiens
gcgatggacggtcggg

SEQ ID NO: 5115 - DNA, 18 bp, Homo sapiens
gcgatggacggtcgggtg

SEQ ID NO: 5116 - DNA, 18 bp, Homo sapiens
gcgatggagatgaggctt

SEQ ID NO: 5117 - DNA, 23 bp, Homo sapiens
gcgatggcgcggagcccgggacg

SEQ ID NO: 5118 - DNA, 19 bp, Homo sapiens
gcgatggcgcggagcgtgc

SEQ ID NO: 5119 - DNA, 17 bp, Homo sapiens
gcgatggcgtacttggc

SEQ ID NO: 5120 - DNA, 20 bp, Homo sapiens
gcgatggcgtcatcaccgag

SEQ ID NO: 5121 - DNA, 18 bp, Homo sapiens
gcgatggctccggactcg

SEQ ID NO: 5122 - DNA, 19 bp, Homo sapiens
gcgatgtggacaagagagg

SEQ ID NO: 5123 - DNA, 18 bp, Homo sapiens
gcgatgttcgacgggaca

SEQ ID NO: 5124 - DNA, 19 bp, Homo sapiens
gcgattgttacgcacctga

SEQ ID NO: 5125 - DNA, 18 bp, Homo sapiens
aggcgtcgggagggccta

SEQ ID NO: 5126 - DNA, 19 bp, Homo sapiens
aggcgtcgggagggcctaa

SEQ ID NO: 5127 - DNA, 17 bp, Homo sapiens
aggcgtgggaggaagat

SEQ ID NO: 5128 - DNA, 18 bp, Homo sapiens
aggcgtgggaggaagatg

SEQ ID NO: 5129 - DNA, 19 bp, Homo sapiens
aggcgtgggaggaagatgg

SEQ ID NO: 5130 - DNA, 21 bp, Homo sapiens
aggcgttcagctgcttcaaga

SEQ ID NO: 5131 - DNA, 16 bp, Homo sapiens
aggcgttgcggcgaaa

SEQ ID NO: 5132 - DNA, 18 bp, Homo sapiens
aggctaacgtggaagtcg

SEQ ID NO: 5133 - DNA, 19 bp, Homo sapiens
aggctacgaaacttggggg

SEQ ID NO: 5134 - DNA, 17 bp, Homo sapiens
aggctacgatgagcaca

SEQ ID NO: 5135 - DNA, 18 bp, Homo sapiens
aggctacgatgagcacac

SEQ ID NO: 5136 - DNA, 18 bp, Homo sapiens
aggctaggtgagccgtgg

SEQ ID NO: 5137 - DNA, 19 bp, Homo sapiens
aggctagtaaatggtgaag

SEQ ID NO: 5138 - DNA, 17 bp, Homo sapiens
aggctatgggcagccag

SEQ ID NO: 5139 - DNA, 23 bp, Homo sapiens
aggctatttgaaaacacgctccg

SEQ ID NO: 5140 - DNA, 23 bp, Homo sapiens
aggctcagaagaaggatggaaag

SEQ ID NO: 5141 - DNA, 19 bp, Homo sapiens
aggctcagaggctgaagca

SEQ ID NO: 5142 - DNA, 18 bp, Homo sapiens
aggctcccggctcgccgc

SEQ ID NO: 5143 - DNA, 14 bp, Homo sapiens
aggctcgcgttccg

SEQ ID NO: 5144 - DNA, 18 bp, Homo sapiens
aggctcgggtcgttgtgg

SEQ ID NO: 5145 - DNA, 18 bp, Homo sapiens
aggctctctaggaatctg

SEQ ID NO: 5146 - DNA, 18 bp, Homo sapiens
aggctctgatcgcggccg

SEQ ID NO: 5147 - DNA, 18 bp, Homo sapiens
aggctctgctccagggca

SEQ ID NO: 5148 - DNA, 19 bp, Homo sapiens
aggctcttgtgctcgcttg

SEQ ID NO: 5149 - DNA, 21 bp, Homo sapiens
aggctgacaatgatttcctca

SEQ ID NO: 5150 - DNA, 22 bp, Homo sapiens
aggctgacctgctgcagctccc

SEQ ID NO: 5151 - DNA, 19 bp, Homo sapiens
aggctgagacgagacgcag

SEQ ID NO: 5152 - DNA, 16 bp, Homo sapiens
aggctgaggagtgcgt

SEQ ID NO: 5153 - DNA, 20 bp, Homo sapiens
aggctgaggctatgatggcg

SEQ ID NO: 5154 - DNA, 21 bp, Homo sapiens
aggctgaggtggcagatagtg

SEQ ID NO: 5155 - DNA, 18 bp, Homo sapiens
aggctgagtgctaaactg

SEQ ID NO: 5156 - DNA, 18 bp, Homo sapiens
aggctgcagttggcgcct

SEQ ID NO: 5157 - DNA, 17 bp, Homo sapiens
aggctgccagagtggtt

SEQ ID NO: 5158 - DNA, 18 bp, Homo sapiens
aggctgccagagtggttg

SEQ ID NO: 5159 - DNA, 17 bp, Homo sapiens
aggctgccgcccagcgc

SEQ ID NO: 5160 - DNA, 19 bp, Homo sapiens
aggctgccgcccagcgccc

SEQ ID NO: 5161 - DNA, 17 bp, Homo sapiens
aggctgccggggggctg

SEQ ID NO: 5162 - DNA, 19 bp, Homo sapiens
aggctgcgagcatggggcc

SEQ ID NO: 5163 - DNA, 18 bp, Homo sapiens
aggctgcggagcggacgg

SEQ ID NO: 5164 - DNA, 19 bp, Homo sapiens
aggctgcggagcggacgga

SEQ ID NO: 5165 - DNA, 19 bp, Homo sapiens
aggctgcggccgcaaggtg

SEQ ID NO: 5166 - DNA, 20 bp, Homo sapiens
aggctgcggccgcaaggtgc

SEQ ID NO: 5167 - DNA, 18 bp, Homo sapiens
aggctgcggcgctgacgg

SEQ ID NO: 5168 - DNA, 17 bp, Homo sapiens
aggctgcggcgggccat

SEQ ID NO: 5169 - DNA, 17 bp, Homo sapiens
aggctgcgggacgcggt

SEQ ID NO: 5170 - DNA, 19 bp, Homo sapiens
aggctgcgttgaggatctt

SEQ ID NO: 5171 - DNA, 17 bp, Homo sapiens
aggctgcgttggggtga

SEQ ID NO: 5172 - DNA, 20 bp, Homo sapiens
aggctgctaagggcaccctc

SEQ ID NO: 5173 - DNA, 20 bp, Homo sapiens
aggctgctacgaagcgagct

SEQ ID NO: 5174 - DNA, 21 bp, Homo sapiens
aggctgctccggaccgggacg

SEQ ID NO: 5175 - DNA, 22 bp, Homo sapiens
aggctgctccggaccgggacgc

SEQ ID NO: 5176 - DNA, 18 bp, Homo sapiens
aggctgctgaggcgcgga

SEQ ID NO: 5177 - DNA, 19 bp, Homo sapiens
aggctggagctaggcgagg

SEQ ID NO: 5178 - DNA, 18 bp, Homo sapiens
aggctggagctgcggcac

SEQ ID NO: 5179 - DNA, 17 bp, Homo sapiens
aggctggaggtactgag

SEQ ID NO: 5180 - DNA, 17 bp, Homo sapiens
aggctggcagatgcgcg

SEQ ID NO: 5181 - DNA, 21 bp, Homo sapiens
aggctggcagctgccggcgct

SEQ ID NO: 5182 - DNA, 21 bp, Homo sapiens
gcgatttagtctgaggcgaag

SEQ ID NO: 5183 - DNA, 18 bp, Homo sapiens
gcgcaagaaggtgcctgc

SEQ ID NO: 5184 - DNA, 17 bp, Homo sapiens
gcgcaagagatttatgc

SEQ ID NO: 5185 - DNA, 17 bp, Homo sapiens
gcgcaaggaaagatcgg

SEQ ID NO: 5186 - DNA, 18 bp, Homo sapiens
gcgcaaggcggtggaggc

SEQ ID NO: 5187 - DNA, 20 bp, Homo sapiens
gcgcaatagcgagacgctgg

SEQ ID NO: 5188 - DNA, 19 bp, Homo sapiens
gcgcaatgcgagcggctgg

SEQ ID NO: 5189 - DNA, 19 bp, Homo sapiens
gcgcaatgggtgtcgggtc

SEQ ID NO: 5190 - DNA, 21 bp, Homo sapiens
gcgcacagagcgagctcttgc

SEQ ID NO: 5191 - DNA, 20 bp, Homo sapiens
gcgcaccatggccgggttgc

SEQ ID NO: 5192 - DNA, 18 bp, Homo sapiens
gcgcacctcatggttccg

SEQ ID NO: 5193 - DNA, 20 bp, Homo sapiens
gcgcacgagggaggaacgcg

SEQ ID NO: 5194 - DNA, 21 bp, Homo sapiens
gcgcacgctgttgccccgtgg

SEQ ID NO: 5195 - DNA, 18 bp, Homo sapiens
gcgcacgggtgccccagc

SEQ ID NO: 5196 - DNA, 21 bp, Homo sapiens
gcgcactccgcctgcagccca

SEQ ID NO: 5197 - DNA, 18 bp, Homo sapiens
gcgcagaacttggggagc

SEQ ID NO: 5198 - DNA, 19 bp, Homo sapiens
gcgcagaacttggggagcc

SEQ ID NO: 5199 - DNA, 16 bp, Homo sapiens
gcgcagagcaggttca

SEQ ID NO: 5200 - DNA, 16 bp, Homo sapiens
gcgcagagcggtttgg

SEQ ID NO: 5201 - DNA, 20 bp, Homo sapiens
gcgcagaggacgcagggccg

SEQ ID NO: 5202 - DNA, 16 bp, Homo sapiens
gcgcagagggctggac

SEQ ID NO: 5203 - DNA, 17 bp, Homo sapiens
gcgcagcgcgggccggg

SEQ ID NO: 5204 - DNA, 18 bp, Homo sapiens
gcgcagcgggaaccggcc

SEQ ID NO: 5205 - DNA, 18 bp, Homo sapiens
gcgcagctaacagacggc

SEQ ID NO: 5206 - DNA, 23 bp, Homo sapiens
gcgcaggacgtgcactatggctc

SEQ ID NO: 5207 - DNA, 19 bp, Homo sapiens
gcgcaggaggacggagccc

SEQ ID NO: 5208 - DNA, 22 bp, Homo sapiens
gcgcaggccgcggcggccgcgg

SEQ ID NO: 5209 - DNA, 20 bp, Homo sapiens
gcgcaggcgctaggaagagg

SEQ ID NO: 5210 - DNA, 17 bp, Homo sapiens
gcgcagggaccggtgag

SEQ ID NO: 5211 - DNA, 19 bp, Homo sapiens
gcgcagggagccaggcggg

SEQ ID NO: 5212 - DNA, 17 bp, Homo sapiens
gcgcagggagcggatcg

SEQ ID NO: 5213 - DNA, 17 bp, Homo sapiens
gcgcagggataagagag

SEQ ID NO: 5214 - DNA, 20 bp, Homo sapiens
gcgcagggcaaggtcctgcg

SEQ ID NO: 5215 - DNA, 18 bp, Homo sapiens
gcgcagggtcggggactg

SEQ ID NO: 5216 - DNA, 18 bp, Homo sapiens
gcgcagtagtgggctggg

SEQ ID NO: 5217 - DNA, 19 bp, Homo sapiens
gcgcagtcgttcgggtgag

SEQ ID NO: 5218 - DNA, 17 bp, Homo sapiens
gcgcagtgttgggactg

SEQ ID NO: 5219 - DNA, 23 bp, Homo sapiens
gcgcagtgttgggactgtctggg

SEQ ID NO: 5220 - DNA, 16 bp, Homo sapiens
gcgcagtttgaatcgc

SEQ ID NO: 5221 - DNA, 18 bp, Homo sapiens
gcgcagtttgaatcgcgg

SEQ ID NO: 5222 - DNA, 18 bp, Homo sapiens
gcgcatccggacgtagga

SEQ ID NO: 5223 - DNA, 19 bp, Homo sapiens
gcgcatgcggtcggggttg

SEQ ID NO: 5224 - DNA, 16 bp, Homo sapiens
gcgccacgagtcggca

SEQ ID NO: 5225 - DNA, 18 bp, Homo sapiens
gcgccacgtctgaggcgg

SEQ ID NO: 5226 - DNA, 18 bp, Homo sapiens
gcgccagaattcggagcg

SEQ ID NO: 5227 - DNA, 22 bp, Homo sapiens
gcgccagccgcgaatcggatct

SEQ ID NO: 5228 - DNA, 18 bp, Homo sapiens
gcgccagtgcggagcggg

SEQ ID NO: 5229 - DNA, 21 bp, Homo sapiens
gcgccatccctatagagaaga

SEQ ID NO: 5230 - DNA, 18 bp, Homo sapiens
gcgccatggtaaggactg

SEQ ID NO: 5231 - DNA, 17 bp, Homo sapiens
gcgccattaaagcgagg

SEQ ID NO: 5232 - DNA, 16 bp, Homo sapiens
gcgcccagcggagggt

SEQ ID NO: 5233 - DNA, 20 bp, Homo sapiens
gcgcccagcggaggtgaaag

SEQ ID NO: 5234 - DNA, 18 bp, Homo sapiens
gcgcccagtgcacggccg

SEQ ID NO: 5235 - DNA, 19 bp, Homo sapiens
gcgcccagtgcacggccgc

SEQ ID NO: 5236 - DNA, 14 bp, Homo sapiens
gcgcccccccggtg

SEQ ID NO: 5237 - DNA, 15 bp, Homo sapiens
gcgcccccccggtgt

SEQ ID NO: 5238 - DNA, 19 bp, Homo sapiens
gcgccccgcgtagttccgg

SEQ ID NO: 5239 - DNA, 18 bp, Homo sapiens
aggctggcaggtggacag

SEQ ID NO: 5240 - DNA, 17 bp, Homo sapiens
aggctggcatctgggta

SEQ ID NO: 5241 - DNA, 19 bp, Homo sapiens
aggctggcatctgggtaag

SEQ ID NO: 5242 - DNA, 22 bp, Homo sapiens
aggctggcatctgggtaagtcc

SEQ ID NO: 5243 - DNA, 18 bp, Homo sapiens
aggctggcgcagcgccga

SEQ ID NO: 5244 - DNA, 18 bp, Homo sapiens
aggctggcggacaggcga

SEQ ID NO: 5245 - DNA, 19 bp, Homo sapiens
aggctggctcttctcggcg

SEQ ID NO: 5246 - DNA, 22 bp, Homo sapiens
aggctgggaagcggcgccatat

SEQ ID NO: 5247 - DNA, 21 bp, Homo sapiens
aggctgggaggagccgaggaa

SEQ ID NO: 5248 - DNA, 18 bp, Homo sapiens
aggctggggcaaccaccg

SEQ ID NO: 5249 - DNA, 19 bp, Homo sapiens
aggctgggtacagggtcta

SEQ ID NO: 5250 - DNA, 18 bp, Homo sapiens
aggctggtagggtaaggg

SEQ ID NO: 5251 - DNA, 18 bp, Homo sapiens
aggctgtacagacatggc

SEQ ID NO: 5252 - DNA, 19 bp, Homo sapiens
aggctgtcggtgactttgg

SEQ ID NO: 5253 - DNA, 17 bp, Homo sapiens
aggctgtgcgaagaggg

SEQ ID NO: 5254 - DNA, 17 bp, Homo sapiens
aggcttcgggccaggct

SEQ ID NO: 5255 - DNA, 22 bp, Homo sapiens
aggcttctgggggtccgcggca

SEQ ID NO: 5256 - DNA, 17 bp, Homo sapiens
aggcttgctggcccgcg

SEQ ID NO: 5257 - DNA, 19 bp, Homo sapiens
aggcttgctggggatgagg

SEQ ID NO: 5258 - DNA, 24 bp, Homo sapiens
aggcttggggaagggtggtgctaa

SEQ ID NO: 5259 - DNA, 18 bp, Homo sapiens
aggcttggggcagccggg

SEQ ID NO: 5260 - DNA, 19 bp, Homo sapiens
aggcttggtggactgtcac

SEQ ID NO: 5261 - DNA, 18 bp, Homo sapiens
agggaaaaagcaacaaga

SEQ ID NO: 5262 - DNA, 21 bp, Homo sapiens
agggaaaaagcaacaagaagg

SEQ ID NO: 5263 - DNA, 18 bp, Homo sapiens
agggaaaaggggaaacgg

SEQ ID NO: 5264 - DNA, 20 bp, Homo sapiens
agggaaaaggggaaacggtg

SEQ ID NO: 5265 - DNA, 24 bp, Homo sapiens
agggaaagaaaagtaacttcgctt

SEQ ID NO: 5266 - DNA, 18 bp, Homo sapiens
agggaaatcgtgcacttg

SEQ ID NO: 5267 - DNA, 20 bp, Homo sapiens
agggaacggcggtggccggt

SEQ ID NO: 5268 - DNA, 18 bp, Homo sapiens
agggaacttgacccgtta

SEQ ID NO: 5269 - DNA, 19 bp, Homo sapiens
agggaagaaggaggaaaat

SEQ ID NO: 5270 - DNA, 18 bp, Homo sapiens
agggaagcaaaggaccgt

SEQ ID NO: 5271 - DNA, 20 bp, Homo sapiens
agggaagcgagggctcggga

SEQ ID NO: 5272 - DNA, 20 bp, Homo sapiens
agggaagcgttacttgaggc

SEQ ID NO: 5273 - DNA, 18 bp, Homo sapiens
agggaaggagatgaacga

SEQ ID NO: 5274 - DNA, 19 bp, Homo sapiens
agggaaggagatgaacgag

SEQ ID NO: 5275 - DNA, 19 bp, Homo sapiens
agggaaggcgggagacagc

SEQ ID NO: 5276 - DNA, 18 bp, Homo sapiens
agggaagggtcggccttg

SEQ ID NO: 5277 - DNA, 18 bp, Homo sapiens
agggaagtagcaggcgcc

SEQ ID NO: 5278 - DNA, 19 bp, Homo sapiens
agggaagtgaatcaggcgc

SEQ ID NO: 5279 - DNA, 16 bp, Homo sapiens
agggaataaggattga

SEQ ID NO: 5280 - DNA, 20 bp, Homo sapiens
agggacacgcggaaccaaga

SEQ ID NO: 5281 - DNA, 20 bp, Homo sapiens
agggacagccggtgggctcg

SEQ ID NO: 5282 - DNA, 18 bp, Homo sapiens
agggacccgcgcggctgc

SEQ ID NO: 5283 - DNA, 18 bp, Homo sapiens
agggaccctccggaagta

SEQ ID NO: 5284 - DNA, 18 bp, Homo sapiens
agggaccggtcggaaggg

SEQ ID NO: 5285 - DNA, 18 bp, Homo sapiens
agggacctagcgcgggcc

SEQ ID NO: 5286 - DNA, 21 bp, Homo sapiens
agggacctgggtagaaggaga

SEQ ID NO: 5287 - DNA, 16 bp, Homo sapiens
agggacgagagggcct

SEQ ID NO: 5288 - DNA, 18 bp, Homo sapiens
agggacgcagctagacct

SEQ ID NO: 5289 - DNA, 18 bp, Homo sapiens
agggacgcgaccagagga

SEQ ID NO: 5290 - DNA, 16 bp, Homo sapiens
agggacggagccaaga

SEQ ID NO: 5291 - DNA, 17 bp, Homo sapiens
agggacggagccaagat

SEQ ID NO: 5292 - DNA, 19 bp, Homo sapiens
agggacggagccaagatgg

SEQ ID NO: 5293 - DNA, 18 bp, Homo sapiens
agggacgggacagagaag

SEQ ID NO: 5294 - DNA, 21 bp, Homo sapiens
agggacgggtagtgaagcggt

SEQ ID NO: 5295 - DNA, 16 bp, Homo sapiens
agggactacaccggtg

SEQ ID NO: 5296 - DNA, 22 bp, Homo sapiens
gcgcccgagtgcactgaagatg

SEQ ID NO: 5297 - DNA, 18 bp, Homo sapiens
gcgcccgcccgaaggctc

SEQ ID NO: 5298 - DNA, 18 bp, Homo sapiens
gcgcccggagtcgaccgc

SEQ ID NO: 5299 - DNA, 20 bp, Homo sapiens
gcgcccgggccgcccagatg

SEQ ID NO: 5300 - DNA, 19 bp, Homo sapiens
gcgccctcccgacgcgcag

SEQ ID NO: 5301 - DNA, 16 bp, Homo sapiens
gcgcccttcagtatcg

SEQ ID NO: 5302 - DNA, 20 bp, Homo sapiens
gcgccgacggctgctcaaac

SEQ ID NO: 5303 - DNA, 24 bp, Homo sapiens
gcgccgagaactaccgttcccggc

SEQ ID NO: 5304 - DNA, 21 bp, Homo sapiens
gcgccgagcagtcatggcggc

SEQ ID NO: 5305 - DNA, 18 bp, Homo sapiens
gcgccgagtgtcgggcgc

SEQ ID NO: 5306 - DNA, 18 bp, Homo sapiens
gcgccgcacgggacacga

SEQ ID NO: 5307 - DNA, 18 bp, Homo sapiens
gcgccgccatttttgctg

SEQ ID NO: 5308 - DNA, 18 bp, Homo sapiens
gcgccgccgtgtccccgc

SEQ ID NO: 5309 - DNA, 16 bp, Homo sapiens
gcgccgcgccgagcga

SEQ ID NO: 5310 - DNA, 17 bp, Homo sapiens
gcgccgcgccgagcgaa

SEQ ID NO: 5311 - DNA, 18 bp, Homo sapiens
gcgccgcgccgagcgaat

SEQ ID NO: 5312 - DNA, 21 bp, Homo sapiens
gcgccgcgccgaggaggctgc

SEQ ID NO: 5313 - DNA, 18 bp, Homo sapiens
gcgccgcggagggtcagg

SEQ ID NO: 5314 - DNA, 17 bp, Homo sapiens
gcgccgctgctgtggca

SEQ ID NO: 5315 - DNA, 24 bp, Homo sapiens
gcgccgctttctggaaggttcgtg

SEQ ID NO: 5316 - DNA, 18 bp, Homo sapiens
gcgccggaggagacgcac

SEQ ID NO: 5317 - DNA, 20 bp, Homo sapiens
gcgccggaggcggaggttct

SEQ ID NO: 5318 - DNA, 19 bp, Homo sapiens
gcgccggaggtgagcggtg

SEQ ID NO: 5319 - DNA, 16 bp, Homo sapiens
gcgccggccggctccg

SEQ ID NO: 5320 - DNA, 17 bp, Homo sapiens
gcgccggcggggctgcg

SEQ ID NO: 5321 - DNA, 19 bp, Homo sapiens
gcgccgggagctggctgag

SEQ ID NO: 5322 - DNA, 17 bp, Homo sapiens
gcgccgggctgacgtgc

SEQ ID NO: 5323 - DNA, 19 bp, Homo sapiens
gcgccgggggcttctggga

SEQ ID NO: 5324 - DNA, 18 bp, Homo sapiens
gcgccgggtccagccgcg

SEQ ID NO: 5325 - DNA, 18 bp, Homo sapiens
gcgccgggtgagagcgtg

SEQ ID NO: 5326 - DNA, 18 bp, Homo sapiens
gcgccggtgaggcggtcc

SEQ ID NO: 5327 - DNA, 14 bp, Homo sapiens
gcgccgtcccccga

SEQ ID NO: 5328 - DNA, 19 bp, Homo sapiens
gcgccgtctggggagcgcg

SEQ ID NO: 5329 - DNA, 21 bp, Homo sapiens
gcgccgtctggggagcgcgag

SEQ ID NO: 5330 - DNA, 22 bp, Homo sapiens
gcgccgtctggggagcgcgagc

SEQ ID NO: 5331 - DNA, 16 bp, Homo sapiens
gcgccgtggcctctcc

SEQ ID NO: 5332 - DNA, 18 bp, Homo sapiens
gcgcctccggcccattta

SEQ ID NO: 5333 - DNA, 18 bp, Homo sapiens
gcgcctctgccgaggcga

SEQ ID NO: 5334 - DNA, 20 bp, Homo sapiens
gcgcctgacgagggtgccgc

SEQ ID NO: 5335 - DNA, 19 bp, Homo sapiens
gcgcctgaggaccggcaac

SEQ ID NO: 5336 - DNA, 18 bp, Homo sapiens
gcgcctgagtgcgtccgc

SEQ ID NO: 5337 - DNA, 21 bp, Homo sapiens
gcgcctgctgctgtccccgtg

SEQ ID NO: 5338 - DNA, 19 bp, Homo sapiens
gcgcctgcttccctctact

SEQ ID NO: 5339 - DNA, 18 bp, Homo sapiens
gcgcctgggacgtggctt

SEQ ID NO: 5340 - DNA, 19 bp, Homo sapiens
gcgccttcgggaggcgagc

SEQ ID NO: 5341 - DNA, 21 bp, Homo sapiens
gcgccttctccgccgggacct

SEQ ID NO: 5342 - DNA, 18 bp, Homo sapiens
gcgcgaaccctgctgggc

SEQ ID NO: 5343 - DNA, 18 bp, Homo sapiens
gcgcgacccgcaggagcg

SEQ ID NO: 5344 - DNA, 18 bp, Homo sapiens
gcgcgagagccgggaccc

SEQ ID NO: 5345 - DNA, 18 bp, Homo sapiens
gcgcgagataaatcacga

SEQ ID NO: 5346 - DNA, 18 bp, Homo sapiens
gcgcgagtgaggaaagga

SEQ ID NO: 5347 - DNA, 17 bp, Homo sapiens
gcgcgatggcaggtgtc

SEQ ID NO: 5348 - DNA, 18 bp, Homo sapiens
gcgcgcaacggcggcgac

SEQ ID NO: 5349 - DNA, 20 bp, Homo sapiens
gcgcgcacgggaggacggag

SEQ ID NO: 5350 - DNA, 21 bp, Homo sapiens
gcgcgcagccacccacgcgac

SEQ ID NO: 5351 - DNA, 18 bp, Homo sapiens
gcgcgcaggccgggaaca

SEQ ID NO: 5352 - DNA, 19 bp, Homo sapiens
gcgcgccaggccgaaccgc

SEQ ID NO: 5353 - DNA, 19 bp, Homo sapiens
agggactagcagttcagcc

SEQ ID NO: 5354 - DNA, 19 bp, Homo sapiens
agggactgggccagagtcc

SEQ ID NO: 5355 - DNA, 19 bp, Homo sapiens
agggactgggtaaaggagg

SEQ ID NO: 5356 - DNA, 17 bp, Homo sapiens
agggactgtcggaggtg

SEQ ID NO: 5357 - DNA, 19 bp, Homo sapiens
agggagagggtggaaggac

SEQ ID NO: 5358 - DNA, 17 bp, Homo sapiens
agggagcaggagaccaa

SEQ ID NO: 5359 - DNA, 17 bp, Homo sapiens
agggagccgcctgctgc

SEQ ID NO: 5360 - DNA, 22 bp, Homo sapiens
agggagcgactagacgaacagt

SEQ ID NO: 5361 - DNA, 17 bp, Homo sapiens
agggagcgagagggcgc

SEQ ID NO: 5362 - DNA, 22 bp, Homo sapiens
agggagcgcgaagcggagggcg

SEQ ID NO: 5363 - DNA, 18 bp, Homo sapiens
agggaggaggggagccgg

SEQ ID NO: 5364 - DNA, 18 bp, Homo sapiens
agggagtggttgtgtgat

SEQ ID NO: 5365 - DNA, 18 bp, Homo sapiens
agggatagcggcagagcc

SEQ ID NO: 5366 - DNA, 16 bp, Homo sapiens
agggatagtcggagcg

SEQ ID NO: 5367 - DNA, 19 bp, Homo sapiens
agggatagtcggagcgagg

SEQ ID NO: 5368 - DNA, 18 bp, Homo sapiens
agggatcgtccgcaggat

SEQ ID NO: 5369 - DNA, 18 bp, Homo sapiens
agggatggcgatggcgta

SEQ ID NO: 5370 - DNA, 17 bp, Homo sapiens
agggatgtgacagagcg

SEQ ID NO: 5371 - DNA, 18 bp, Homo sapiens
agggattgacacaaatgg

SEQ ID NO: 5372 - DNA, 23 bp, Homo sapiens
agggatttgaaccgcgctgacga

SEQ ID NO: 5373 - DNA, 18 bp, Homo sapiens
agggcagaagtccctggc

SEQ ID NO: 5374 - DNA, 18 bp, Homo sapiens
agggcagcgctcggggct

SEQ ID NO: 5375 - DNA, 20 bp, Homo sapiens
agggcagctctggggcagaa

SEQ ID NO: 5376 - DNA, 18 bp, Homo sapiens
agggcagggactgactcc

SEQ ID NO: 5377 - DNA, 18 bp, Homo sapiens
agggcattacaaaaccgg

SEQ ID NO: 5378 - DNA, 19 bp, Homo sapiens
agggcccgcaggggtcccc

SEQ ID NO: 5379 - DNA, 18 bp, Homo sapiens
agggcccgcgggagccca

SEQ ID NO: 5380 - DNA, 18 bp, Homo sapiens
agggcccgtcggacagcc

SEQ ID NO: 5381 - DNA, 20 bp, Homo sapiens
agggcccgtcggacagccac

SEQ ID NO: 5382 - DNA, 18 bp, Homo sapiens
agggccggcggcggcccg

SEQ ID NO: 5383 - DNA, 19 bp, Homo sapiens
agggccggcggcggcccgc

SEQ ID NO: 5384 - DNA, 17 bp, Homo sapiens
agggccggggtgggcca

SEQ ID NO: 5385 - DNA, 17 bp, Homo sapiens
agggcctggtcggacgg

SEQ ID NO: 5386 - DNA, 18 bp, Homo sapiens
agggcctggtcggacgga

SEQ ID NO: 5387 - DNA, 20 bp, Homo sapiens
agggccttgaaggggaggca

SEQ ID NO: 5388 - DNA, 18 bp, Homo sapiens
agggcgagaacggagagt

SEQ ID NO: 5389 - DNA, 18 bp, Homo sapiens
agggcgagcgagagagca

SEQ ID NO: 5390 - DNA, 20 bp, Homo sapiens
agggcgccagggaggccgcg

SEQ ID NO: 5391 - DNA, 17 bp, Homo sapiens
agggcgcggcctctgag

SEQ ID NO: 5392 - DNA, 19 bp, Homo sapiens
agggcgcgggaccctgcac

SEQ ID NO: 5393 - DNA, 17 bp, Homo sapiens
agggcgctccaggcgac

SEQ ID NO: 5394 - DNA, 19 bp, Homo sapiens
agggcgctccaggcgacag

SEQ ID NO: 5395 - DNA, 19 bp, Homo sapiens
agggcgctgcgcggcgcag

SEQ ID NO: 5396 - DNA, 17 bp, Homo sapiens
agggcggaagtgcagca

SEQ ID NO: 5397 - DNA, 17 bp, Homo sapiens
agggcggagggcggaac

SEQ ID NO: 5398 - DNA, 17 bp, Homo sapiens
agggcggatggcagcca

SEQ ID NO: 5399 - DNA, 19 bp, Homo sapiens
agggcggcgacggtggtgg

SEQ ID NO: 5400 - DNA, 18 bp, Homo sapiens
agggcggcggtagctgca

SEQ ID NO: 5401 - DNA, 21 bp, Homo sapiens
agggcggctggctcgcctcgg

SEQ ID NO: 5402 - DNA, 20 bp, Homo sapiens
agggcggtagcgtgaaactt

SEQ ID NO: 5403 - DNA, 23 bp, Homo sapiens
agggctataagaggagccgggcg

SEQ ID NO: 5404 - DNA, 21 bp, Homo sapiens
agggctcgggagaaagggatc

SEQ ID NO: 5405 - DNA, 16 bp, Homo sapiens
agggctctggtggcga

SEQ ID NO: 5406 - DNA, 21 bp, Homo sapiens
agggctgacgctccggtgctc

SEQ ID NO: 5407 - DNA, 17 bp, Homo sapiens
agggctgagtgacgggt

SEQ ID NO: 5408 - DNA, 18 bp, Homo sapiens
agggctgcggtaggccag

SEQ ID NO: 5409 - DNA, 18 bp, Homo sapiens
agggctgggacgcagggg

SEQ ID NO: 5410 - DNA, 21 bp, Homo sapiens
gcgcgccatggagcggctgcg

SEQ ID NO: 5411 - DNA, 16 bp, Homo sapiens
gcgcgccatggagggc

SEQ ID NO: 5412 - DNA, 19 bp, Homo sapiens
gcgcgccctctgggtaggc

SEQ ID NO: 5413 - DNA, 22 bp, Homo sapiens
gcgcgccctgcgcggagctggg

SEQ ID NO: 5414 - DNA, 18 bp, Homo sapiens
gcgcgccgcgccgagcga

SEQ ID NO: 5415 - DNA, 17 bp, Homo sapiens
gcgcgcgcctgagaaga

SEQ ID NO: 5416 - DNA, 19 bp, Homo sapiens
gcgcgcgcctgccggtccg

SEQ ID NO: 5417 - DNA, 21 bp, Homo sapiens
gcgcgcgccttccggatcgca

SEQ ID NO: 5418 - DNA, 21 bp, Homo sapiens
gcgcgcgcgcctgccggtccg

SEQ ID NO: 5419 - DNA, 20 bp, Homo sapiens
gcgcgcgctagcggcgccgg

SEQ ID NO: 5420 - DNA, 18 bp, Homo sapiens
gcgcgcggatggccgcag

SEQ ID NO: 5421 - DNA, 19 bp, Homo sapiens
gcgcgcggcgagctgaggg

SEQ ID NO: 5422 - DNA, 20 bp, Homo sapiens
gcgcgcgggctgcgggcggc

SEQ ID NO: 5423 - DNA, 16 bp, Homo sapiens
gcgcgcgggtcggggc

SEQ ID NO: 5424 - DNA, 20 bp, Homo sapiens
gcgcgcgttgcggccgcagc

SEQ ID NO: 5425 - DNA, 19 bp, Homo sapiens
gcgcgctccggactgaggt

SEQ ID NO: 5426 - DNA, 17 bp, Homo sapiens
gcgcgctccgttctccg

SEQ ID NO: 5427 - DNA, 16 bp, Homo sapiens
gcgcgctcgcgtcccc

SEQ ID NO: 5428 - DNA, 18 bp, Homo sapiens
gcgcgctcgtggggtgcg

SEQ ID NO: 5429 - DNA, 21 bp, Homo sapiens
gcgcgctgctgcggctgctgc

SEQ ID NO: 5430 - DNA, 17 bp, Homo sapiens
gcgcgcttccccgccta

SEQ ID NO: 5431 - DNA, 23 bp, Homo sapiens
gcgcggacagtatctgtgggtac

SEQ ID NO: 5432 - DNA, 19 bp, Homo sapiens
gcgcggacggctgggctgc

SEQ ID NO: 5433 - DNA, 19 bp, Homo sapiens
gcgcggacgtcagagtgga

SEQ ID NO: 5434 - DNA, 19 bp, Homo sapiens
gcgcggactatcgggcggc

SEQ ID NO: 5435 - DNA, 22 bp, Homo sapiens
gcgcggagaccgaaggctggcg

SEQ ID NO: 5436 - DNA, 19 bp, Homo sapiens
gcgcggagcggagcggcgg

SEQ ID NO: 5437 - DNA, 17 bp, Homo sapiens
gcgcggagcgggagggc

SEQ ID NO: 5438 - DNA, 17 bp, Homo sapiens
gcgcggagctgccaggc

SEQ ID NO: 5439 - DNA, 21 bp, Homo sapiens
gcgcggagctggcggcagtga

SEQ ID NO: 5440 - DNA, 18 bp, Homo sapiens
gcgcggaggaagagagga

SEQ ID NO: 5441 - DNA, 18 bp, Homo sapiens
gcgcggaggctcggggag

SEQ ID NO: 5442 - DNA, 19 bp, Homo sapiens
gcgcggagggccggagacg

SEQ ID NO: 5443 - DNA, 17 bp, Homo sapiens
gcgcggagtctgggccg

SEQ ID NO: 5444 - DNA, 18 bp, Homo sapiens
gcgcggcagggcccggag

SEQ ID NO: 5445 - DNA, 18 bp, Homo sapiens
gcgcggcatactcagcgg

SEQ ID NO: 5446 - DNA, 18 bp, Homo sapiens
gcgcggcccgcgtccccg

SEQ ID NO: 5447 - DNA, 18 bp, Homo sapiens
gcgcggccgcacggccct

SEQ ID NO: 5448 - DNA, 21 bp, Homo sapiens
gcgcggccgcccctcggacca

SEQ ID NO: 5449 - DNA, 18 bp, Homo sapiens
gcgcggccgccgctgtca

SEQ ID NO: 5450 - DNA, 16 bp, Homo sapiens
gcgcggccgttagcgg

SEQ ID NO: 5451 - DNA, 19 bp, Homo sapiens
gcgcggcgatggggagcgg

SEQ ID NO: 5452 - DNA, 18 bp, Homo sapiens
gcgcggcggccccaggta

SEQ ID NO: 5453 - DNA, 19 bp, Homo sapiens
gcgcggcggtcactgcgcc

SEQ ID NO: 5454 - DNA, 21 bp, Homo sapiens
gcgcggcggtgtggaccgcgc

SEQ ID NO: 5455 - DNA, 19 bp, Homo sapiens
gcgcggcgtagtggatgca

SEQ ID NO: 5456 - DNA, 18 bp, Homo sapiens
gcgcggctgcagcagggc

SEQ ID NO: 5457 - DNA, 18 bp, Homo sapiens
gcgcggctggggaaggtg

SEQ ID NO: 5458 - DNA, 18 bp, Homo sapiens
gcgcggctgtccgggcgc

SEQ ID NO: 5459 - DNA, 15 bp, Homo sapiens
gcgcgggaacgacgg

SEQ ID NO: 5460 - DNA, 19 bp, Homo sapiens
gcgcgggagtgtgtgcgcc

SEQ ID NO: 5461 - DNA, 22 bp, Homo sapiens
gcgcgggcaaggcgggcggagc

SEQ ID NO: 5462 - DNA, 19 bp, Homo sapiens
gcgcgggcggctaggggct

SEQ ID NO: 5463 - DNA, 17 bp, Homo sapiens
gcgcgggctacctcagt

SEQ ID NO: 5464 - DNA, 20 bp, Homo sapiens
gcgcgggctggccctcggct

SEQ ID NO: 5465 - DNA, 20 bp, Homo sapiens
gcgcgggctgggaggtgttc

SEQ ID NO: 5466 - DNA, 17 bp, Homo sapiens
gcgcggggcagcaacag

SEQ ID NO: 5467 - DNA, 16 bp, Homo sapiens
agggctgtcggcgcag

SEQ ID NO: 5468 - DNA, 19 bp, Homo sapiens
agggctgtgtgatggcctc

SEQ ID NO: 5469 - DNA, 20 bp, Homo sapiens
agggctgttgagacgcgagg

SEQ ID NO: 5470 - DNA, 17 bp, Homo sapiens
aggggaacgtgggttga

SEQ ID NO: 5471 - DNA, 20 bp, Homo sapiens
aggggaacttgagggaagta

SEQ ID NO: 5472 - DNA, 24 bp, Homo sapiens
aggggaagaggaggaagtggagcc

SEQ ID NO: 5473 - DNA, 18 bp, Homo sapiens
aggggaccaagctaccgg

SEQ ID NO: 5474 - DNA, 18 bp, Homo sapiens
aggggacgtgggaaagtg

SEQ ID NO: 5475 - DNA, 21 bp, Homo sapiens
aggggactagcagcgaatatg

SEQ ID NO: 5476 - DNA, 19 bp, Homo sapiens
aggggaggaaatgatcgag

SEQ ID NO: 5477 - DNA, 18 bp, Homo sapiens
aggggaggagagccacgc

SEQ ID NO: 5478 - DNA, 18 bp, Homo sapiens
aggggaggcggagaagga

SEQ ID NO: 5479 - DNA, 17 bp, Homo sapiens
aggggaggtcgtgatgg

SEQ ID NO: 5480 - DNA, 19 bp, Homo sapiens
aggggatgtaacggtcgcc

SEQ ID NO: 5481 - DNA, 18 bp, Homo sapiens
aggggattgaggggttga

SEQ ID NO: 5482 - DNA, 20 bp, Homo sapiens
aggggcaggtgctgggcggc

SEQ ID NO: 5483 - DNA, 18 bp, Homo sapiens
aggggccgcaggtactgc

SEQ ID NO: 5484 - DNA, 19 bp, Homo sapiens
aggggccgccatcccctca

SEQ ID NO: 5485 - DNA, 16 bp, Homo sapiens
aggggccggcggtggc

SEQ ID NO: 5486 - DNA, 23 bp, Homo sapiens
aggggcctgcggagctgagggca

SEQ ID NO: 5487 - DNA, 17 bp, Homo sapiens
aggggcgccaggacgtg

SEQ ID NO: 5488 - DNA, 19 bp, Homo sapiens
aggggcgcctggcgctacg

SEQ ID NO: 5489 - DNA, 15 bp, Homo sapiens
aggggcggaggaggc

SEQ ID NO: 5490 - DNA, 18 bp, Homo sapiens
aggggcggcggcgaatgc

SEQ ID NO: 5491 - DNA, 18 bp, Homo sapiens
aggggcggctggaccgac

SEQ ID NO: 5492 - DNA, 16 bp, Homo sapiens
aggggcgttatctgga

SEQ ID NO: 5493 - DNA, 18 bp, Homo sapiens
aggggctattgcaaagcc

SEQ ID NO: 5494 - DNA, 19 bp, Homo sapiens
aggggctcccagtccttcc

SEQ ID NO: 5495 - DNA, 20 bp, Homo sapiens
aggggctcctgttgcaatgg

SEQ ID NO: 5496 - DNA, 16 bp, Homo sapiens
aggggctgcaggtggc

SEQ ID NO: 5497 - DNA, 21 bp, Homo sapiens
aggggcttgtacggcaactgg

SEQ ID NO: 5498 - DNA, 19 bp, Homo sapiens
agggggacagcaagggacg

SEQ ID NO: 5499 - DNA, 16 bp, Homo sapiens
agggggacagcgactc

SEQ ID NO: 5500 - DNA, 19 bp, Homo sapiens
agggggggcacgaacttcg

SEQ ID NO: 5501 - DNA, 18 bp, Homo sapiens
agggggtggaaggaggca

SEQ ID NO: 5502 - DNA, 20 bp, Homo sapiens
aggggtagaagaaggaagtg

SEQ ID NO: 5503 - DNA, 18 bp, Homo sapiens
aggggtcacgcggccggg

SEQ ID NO: 5504 - DNA, 18 bp, Homo sapiens
aggggtcgggctcggccg

SEQ ID NO: 5505 - DNA, 19 bp, Homo sapiens
aggggtcgggctcggccgt

SEQ ID NO: 5506 - DNA, 20 bp, Homo sapiens
aggggtctgcgggcgactgc

SEQ ID NO: 5507 - DNA, 18 bp, Homo sapiens
aggggtgggagggcggcc

SEQ ID NO: 5508 - DNA, 20 bp, Homo sapiens
aggggtgggggttccccgcg

SEQ ID NO: 5509 - DNA, 19 bp, Homo sapiens
aggggtgggtcggggcatc

SEQ ID NO: 5510 - DNA, 18 bp, Homo sapiens
aggggtgtggacggtttg

SEQ ID NO: 5511 - DNA, 18 bp, Homo sapiens
aggggtgtgtaagactct

SEQ ID NO: 5512 - DNA, 17 bp, Homo sapiens
aggggttggactaatgg

SEQ ID NO: 5513 - DNA, 18 bp, Homo sapiens
aggggttggactaatggc

SEQ ID NO: 5514 - DNA, 16 bp, Homo sapiens
agggtaacatcccggg

SEQ ID NO: 5515 - DNA, 18 bp, Homo sapiens
agggtcgggggatccctc

SEQ ID NO: 5516 - DNA, 18 bp, Homo sapiens
agggtcgggggcgaggct

SEQ ID NO: 5517 - DNA, 16 bp, Homo sapiens
agggtgagtctggacg

SEQ ID NO: 5518 - DNA, 17 bp, Homo sapiens
agggtgagtctggacgc

SEQ ID NO: 5519 - DNA, 15 bp, Homo sapiens
agggtgatacgtggg

SEQ ID NO: 5520 - DNA, 17 bp, Homo sapiens
agggtgcgtgcgggccg

SEQ ID NO: 5521 - DNA, 19 bp, Homo sapiens
agggtggaagcctggcgca

SEQ ID NO: 5522 - DNA, 16 bp, Homo sapiens
agggttagcggagcac

SEQ ID NO: 5523 - DNA, 23 bp, Homo sapiens
aggtaaacggaccctgcagaccg

SEQ ID NO: 5524 - DNA, 23 bp, Homo sapiens
gcgcggggcccgggcttcggccg

SEQ ID NO: 5525 - DNA, 18 bp, Homo sapiens
gcgcggggccgctagcca

SEQ ID NO: 5526 - DNA, 18 bp, Homo sapiens
gcgcggggtccggacagc

SEQ ID NO: 5527 - DNA, 24 bp, Homo sapiens
gcgcggtcgtcggagcgcggctca

SEQ ID NO: 5528 - DNA, 18 bp, Homo sapiens
gcgcggtgagtggggtcc

SEQ ID NO: 5529 - DNA, 18 bp, Homo sapiens
gcgcggtggccagcgcgc

SEQ ID NO: 5530 - DNA, 23 bp, Homo sapiens
gcgcgtcggcgcccaggaggacg

SEQ ID NO: 5531 - DNA, 20 bp, Homo sapiens
gcgcgtgacggaggagcggt

SEQ ID NO: 5532 - DNA, 17 bp, Homo sapiens
gcgcgtgcccaggctca

SEQ ID NO: 5533 - DNA, 24 bp, Homo sapiens
gcgcgtgcgtgacgtcaggccacg

SEQ ID NO: 5534 - DNA, 18 bp, Homo sapiens
gcgcgtgtggtctgggtg

SEQ ID NO: 5535 - DNA, 24 bp, Homo sapiens
gcgcgttccctatggcgaagctgc

SEQ ID NO: 5536 - DNA, 19 bp, Homo sapiens
gcgctacgtgggagcttgg

SEQ ID NO: 5537 - DNA, 17 bp, Homo sapiens
gcgctagagagaaacat

SEQ ID NO: 5538 - DNA, 18 bp, Homo sapiens
gcgctagagagaaacatg

SEQ ID NO: 5539 - DNA, 16 bp, Homo sapiens
gcgctcacaattgcca

SEQ ID NO: 5540 - DNA, 20 bp, Homo sapiens
gcgctccggaaagctgcggc

SEQ ID NO: 5541 - DNA, 19 bp, Homo sapiens
gcgctcgagttcctgcgcg

SEQ ID NO: 5542 - DNA, 17 bp, Homo sapiens
gcgctcggcaaggtagg

SEQ ID NO: 5543 - DNA, 16 bp, Homo sapiens
gcgctcgggcagcctg

SEQ ID NO: 5544 - DNA, 18 bp, Homo sapiens
gcgctctggttcgggctg

SEQ ID NO: 5545 - DNA, 18 bp, Homo sapiens
gcgctctttacaaaggcc

SEQ ID NO: 5546 - DNA, 18 bp, Homo sapiens
gcgctgaatgagagacgg

SEQ ID NO: 5547 - DNA, 19 bp, Homo sapiens
gcgctgactcacccgggcc

SEQ ID NO: 5548 - DNA, 19 bp, Homo sapiens
gcgctgagcgcggcggcgg

SEQ ID NO: 5549 - DNA, 20 bp, Homo sapiens
gcgctgaggctccggcggac

SEQ ID NO: 5550 - DNA, 18 bp, Homo sapiens
gcgctgaggtcggaacgt

SEQ ID NO: 5551 - DNA, 20 bp, Homo sapiens
gcgctgagtggtttttcgga

SEQ ID NO: 5552 - DNA, 23 bp, Homo sapiens
gcgctgagtggtttttcggatca

SEQ ID NO: 5553 - DNA, 18 bp, Homo sapiens
gcgctgcacaatggcggc

SEQ ID NO: 5554 - DNA, 21 bp, Homo sapiens
gcgctgccggcttgcagcggg

SEQ ID NO: 5555 - DNA, 18 bp, Homo sapiens
gcgctgccgggtgaaatc

SEQ ID NO: 5556 - DNA, 22 bp, Homo sapiens
gcgctgcgagcggagccgcgcg

SEQ ID NO: 5557 - DNA, 18 bp, Homo sapiens
gcgctgcggggtaggctg

SEQ ID NO: 5558 - DNA, 19 bp, Homo sapiens
gcgctggagtatccagata

SEQ ID NO: 5559 - DNA, 17 bp, Homo sapiens
gcgctgggcttgccggg

SEQ ID NO: 5560 - DNA, 16 bp, Homo sapiens
gcgctggggacggaag

SEQ ID NO: 5561 - DNA, 20 bp, Homo sapiens
gcgctggggagcggacgctg

SEQ ID NO: 5562 - DNA, 17 bp, Homo sapiens
gcgctggtggtcgatcg

SEQ ID NO: 5563 - DNA, 21 bp, Homo sapiens
gcgctgtatagggctgtggat

SEQ ID NO: 5564 - DNA, 20 bp, Homo sapiens
gcgctgtcatggaggacgcc

SEQ ID NO: 5565 - DNA, 18 bp, Homo sapiens
gcgcttcagtagcgagag

SEQ ID NO: 5566 - DNA, 19 bp, Homo sapiens
gcgcttccgccaccatggc

SEQ ID NO: 5567 - DNA, 16 bp, Homo sapiens
gcgcttccttcttctc

SEQ ID NO: 5568 - DNA, 18 bp, Homo sapiens
gcgcttcctttttgtccg

SEQ ID NO: 5569 - DNA, 24 bp, Homo sapiens
gcgcttcctttttgtccgacatct

SEQ ID NO: 5570 - DNA, 19 bp, Homo sapiens
gcgcttgcatctcttcgcc

SEQ ID NO: 5571 - DNA, 16 bp, Homo sapiens
gcgcttggccggcgac

SEQ ID NO: 5572 - DNA, 20 bp, Homo sapiens
gcgcttgggtgacgcgacga

SEQ ID NO: 5573 - DNA, 18 bp, Homo sapiens
gcggaaaggatggcgctg

SEQ ID NO: 5574 - DNA, 19 bp, Homo sapiens
gcggaaaggatggcgctgt

SEQ ID NO: 5575 - DNA, 18 bp, Homo sapiens
gcggaaaggcgagaggtg

SEQ ID NO: 5576 - DNA, 17 bp, Homo sapiens
gcggaaagtggtagcga

SEQ ID NO: 5577 - DNA, 18 bp, Homo sapiens
gcggaaagtggtagcgat

SEQ ID NO: 5578 - DNA, 19 bp, Homo sapiens
gcggaacatggcggaagcg

SEQ ID NO: 5579 - DNA, 19 bp, Homo sapiens
gcggaacctcggcgcggtg

SEQ ID NO: 5580 - DNA, 19 bp, Homo sapiens
gcggaaccttccaccatca

SEQ ID NO: 5581 - DNA, 18 bp, Homo sapiens
aggtaaagaagtcatggc

SEQ ID NO: 5582 - DNA, 21 bp, Homo sapiens
aggtaaagaagtcatggcggc

SEQ ID NO: 5583 - DNA, 18 bp, Homo sapiens
aggtaaagggacactctc

SEQ ID NO: 5584 - DNA, 18 bp, Homo sapiens
aggtaaatgccggcgccg

SEQ ID NO: 5585 - DNA, 19 bp, Homo sapiens
aggtaagagagctgtcagg

SEQ ID NO: 5586 - DNA, 18 bp, Homo sapiens
aggtaagcggggtagaag

SEQ ID NO: 5587 - DNA, 18 bp, Homo sapiens
aggtaagggaagagtggc

SEQ ID NO: 5588 - DNA, 16 bp, Homo sapiens
aggtaagggtggcggg

SEQ ID NO: 5589 - DNA, 17 bp, Homo sapiens
aggtagatcgccggggg

SEQ ID NO: 5590 - DNA, 18 bp, Homo sapiens
aggtagatggtcaattag

SEQ ID NO: 5591 - DNA, 17 bp, Homo sapiens
aggtagcaagatggccg

SEQ ID NO: 5592 - DNA, 16 bp, Homo sapiens
aggtagccacgcagcc

SEQ ID NO: 5593 - DNA, 16 bp, Homo sapiens
aggtagcgagtggacg

SEQ ID NO: 5594 - DNA, 17 bp, Homo sapiens
aggtagcggcggcaacg

SEQ ID NO: 5595 - DNA, 18 bp, Homo sapiens
aggtagcgtcttgatctg

SEQ ID NO: 5596 - DNA, 18 bp, Homo sapiens
aggtaggatccggaagtg

SEQ ID NO: 5597 - DNA, 18 bp, Homo sapiens
aggtaggatgagaaggca

SEQ ID NO: 5598 - DNA, 19 bp, Homo sapiens
aggtaggttggcggcctgc

SEQ ID NO: 5599 - DNA, 18 bp, Homo sapiens
aggtatacgggtagggcg

SEQ ID NO: 5600 - DNA, 19 bp, Homo sapiens
aggtcagagctgcggcctg

SEQ ID NO: 5601 - DNA, 18 bp, Homo sapiens
aggtcagtggagagcgac

SEQ ID NO: 5602 - DNA, 17 bp, Homo sapiens
aggtcccgccagcaacc

SEQ ID NO: 5603 - DNA, 18 bp, Homo sapiens
aggtcccggagagctgag

SEQ ID NO: 5604 - DNA, 16 bp, Homo sapiens
aggtcgcagaacagcc

SEQ ID NO: 5605 - DNA, 18 bp, Homo sapiens
aggtcggaaccgacagcc

SEQ ID NO: 5606 - DNA, 16 bp, Homo sapiens
aggtcggagcggaagg

SEQ ID NO: 5607 - DNA, 17 bp, Homo sapiens
aggtcggagcggaagga

SEQ ID NO: 5608 - DNA, 20 bp, Homo sapiens
aggtcggccgtggtagcgta

SEQ ID NO: 5609 - DNA, 18 bp, Homo sapiens
aggtcggcggctccggtg

SEQ ID NO: 5610 - DNA, 19 bp, Homo sapiens
aggtcggctggttatcggg

SEQ ID NO: 5611 - DNA, 17 bp, Homo sapiens
aggtcgggaggaggcag

SEQ ID NO: 5612 - DNA, 18 bp, Homo sapiens
aggtcgggccgcgagcgg

SEQ ID NO: 5613 - DNA, 22 bp, Homo sapiens
aggtcgggcggtagcgacaggt

SEQ ID NO: 5614 - DNA, 18 bp, Homo sapiens
aggtcggtataagcgcca

SEQ ID NO: 5615 - DNA, 20 bp, Homo sapiens
aggtctcgtcttcatttctg

SEQ ID NO: 5616 - DNA, 19 bp, Homo sapiens
aggtctctagcagctgccg

SEQ ID NO: 5617 - DNA, 20 bp, Homo sapiens
aggtctgggaggcagttctg

SEQ ID NO: 5618 - DNA, 20 bp, Homo sapiens
aggtcttcccgccacactcc

SEQ ID NO: 5619 - DNA, 18 bp, Homo sapiens
aggtgaaaggtggagcgg

SEQ ID NO: 5620 - DNA, 20 bp, Homo sapiens
aggtgaactggccgctgaga

SEQ ID NO: 5621 - DNA, 22 bp, Homo sapiens
aggtgaagacgggcggagagaa

SEQ ID NO: 5622 - DNA, 18 bp, Homo sapiens
aggtgaaggtctggtccc

SEQ ID NO: 5623 - DNA, 17 bp, Homo sapiens
aggtgacagcctcgctt

SEQ ID NO: 5624 - DNA, 16 bp, Homo sapiens
aggtgaggcggaactc

SEQ ID NO: 5625 - DNA, 18 bp, Homo sapiens
aggtgaggcggaactctg

SEQ ID NO: 5626 - DNA, 18 bp, Homo sapiens
aggtgagggacgatggct

SEQ ID NO: 5627 - DNA, 20 bp, Homo sapiens
aggtgagggagactgggtcc

SEQ ID NO: 5628 - DNA, 18 bp, Homo sapiens
aggtgagggaggaaggga

SEQ ID NO: 5629 - DNA, 17 bp, Homo sapiens
aggtgagggcgagaagg

SEQ ID NO: 5630 - DNA, 18 bp, Homo sapiens
aggtgagggcgagaaggc

SEQ ID NO: 5631 - DNA, 19 bp, Homo sapiens
aggtgagggcgagaaggcc

SEQ ID NO: 5632 - DNA, 21 bp, Homo sapiens
aggtgagggtgtgcagcttgg

SEQ ID NO: 5633 - DNA, 19 bp, Homo sapiens
aggtgaggtggcaccggac

SEQ ID NO: 5634 - DNA, 18 bp, Homo sapiens
aggtgagtgaagggtctg

SEQ ID NO: 5635 - DNA, 18 bp, Homo sapiens
aggtgcaagccagagctc

SEQ ID NO: 5636 - DNA, 17 bp, Homo sapiens
aggtgcagggtcgggtt

SEQ ID NO: 5637 - DNA, 18 bp, Homo sapiens
aggtgcaggtatgggctc

SEQ ID NO: 5638 - DNA, 17 bp, Homo sapiens
gcggaacggggtcagga

SEQ ID NO: 5639 - DNA, 22 bp, Homo sapiens
gcggaactctgaggtgagggtg

SEQ ID NO: 5640 - DNA, 20 bp, Homo sapiens
gcggaactggggttgcggcg

SEQ ID NO: 5641 - DNA, 18 bp, Homo sapiens
gcggaagagatcgagctc

SEQ ID NO: 5642 - DNA, 22 bp, Homo sapiens
gcggaagcctgtgctgaagccc

SEQ ID NO: 5643 - DNA, 19 bp, Homo sapiens
gcggaagcgaaggcagacg

SEQ ID NO: 5644 - DNA, 18 bp, Homo sapiens
gcggaagcggagagcaac

SEQ ID NO: 5645 - DNA, 19 bp, Homo sapiens
gcggaagcggaggagtctc

SEQ ID NO: 5646 - DNA, 16 bp, Homo sapiens
gcggaaggagaagatg

SEQ ID NO: 5647 - DNA, 18 bp, Homo sapiens
gcggaaggagaagatgtg

SEQ ID NO: 5648 - DNA, 18 bp, Homo sapiens
gcggaaggagacgcggcc

SEQ ID NO: 5649 - DNA, 19 bp, Homo sapiens
gcggaaggatggagctggc

SEQ ID NO: 5650 - DNA, 18 bp, Homo sapiens
gcggaaggtgcgtccgag

SEQ ID NO: 5651 - DNA, 18 bp, Homo sapiens
gcggaagtagcagtcctg

SEQ ID NO: 5652 - DNA, 20 bp, Homo sapiens
gcggaagtaggaagccgagg

SEQ ID NO: 5653 - DNA, 22 bp, Homo sapiens
gcggaagtcggggtctgacccg

SEQ ID NO: 5654 - DNA, 18 bp, Homo sapiens
gcggaagtgcctcagcgg

SEQ ID NO: 5655 - DNA, 18 bp, Homo sapiens
gcggaagtggaggaaaga

SEQ ID NO: 5656 - DNA, 21 bp, Homo sapiens
gcggaagtggaggaaagatgg

SEQ ID NO: 5657 - DNA, 18 bp, Homo sapiens
gcggaagtggaggagcgg

SEQ ID NO: 5658 - DNA, 18 bp, Homo sapiens
gcggaatgagatggatac

SEQ ID NO: 5659 - DNA, 18 bp, Homo sapiens
gcggacaagtccagacat

SEQ ID NO: 5660 - DNA, 18 bp, Homo sapiens
gcggacacgggagcaaga

SEQ ID NO: 5661 - DNA, 16 bp, Homo sapiens
gcggacagacaggcga

SEQ ID NO: 5662 - DNA, 17 bp, Homo sapiens
gcggacagacaggcgag

SEQ ID NO: 5663 - DNA, 18 bp, Homo sapiens
gcggacagacaggcgaga

SEQ ID NO: 5664 - DNA, 17 bp, Homo sapiens
gcggacagcggagccag

SEQ ID NO: 5665 - DNA, 18 bp, Homo sapiens
gcggacagggcgatggca

SEQ ID NO: 5666 - DNA, 20 bp, Homo sapiens
gcggacagtatctgtgggta

SEQ ID NO: 5667 - DNA, 18 bp, Homo sapiens
gcggacatctccctggac

SEQ ID NO: 5668 - DNA, 17 bp, Homo sapiens
gcggaccgagacagcgg

SEQ ID NO: 5669 - DNA, 18 bp, Homo sapiens
gcggaccgagacagcggc

SEQ ID NO: 5670 - DNA, 16 bp, Homo sapiens
gcggaccgaggcgaga

SEQ ID NO: 5671 - DNA, 22 bp, Homo sapiens
gcggaccgcttctcccgcttca

SEQ ID NO: 5672 - DNA, 18 bp, Homo sapiens
gcggacctggcggccggg

SEQ ID NO: 5673 - DNA, 17 bp, Homo sapiens
gcggacgctgcatcccc

SEQ ID NO: 5674 - DNA, 18 bp, Homo sapiens
gcggacgctgcatcccct

SEQ ID NO: 5675 - DNA, 16 bp, Homo sapiens
gcggacggaaagggag

SEQ ID NO: 5676 - DNA, 17 bp, Homo sapiens
gcggacggaaagggaga

SEQ ID NO: 5677 - DNA, 18 bp, Homo sapiens
gcggacggaaagggagac

SEQ ID NO: 5678 - DNA, 19 bp, Homo sapiens
gcggacggaaagggagacg

SEQ ID NO: 5679 - DNA, 20 bp, Homo sapiens
gcggacggatgcttaggcag

SEQ ID NO: 5680 - DNA, 19 bp, Homo sapiens
gcggacggcgtggagtgac

SEQ ID NO: 5681 - DNA, 16 bp, Homo sapiens
gcggacggcgtgggtc

SEQ ID NO: 5682 - DNA, 16 bp, Homo sapiens
gcggacggctgcttcc

SEQ ID NO: 5683 - DNA, 17 bp, Homo sapiens
gcggacggtatggagga

SEQ ID NO: 5684 - DNA, 17 bp, Homo sapiens
gcggacggtccggcttc

SEQ ID NO: 5685 - DNA, 19 bp, Homo sapiens
gcggactcagcgggccggg

SEQ ID NO: 5686 - DNA, 20 bp, Homo sapiens
gcggactcgaacgcagttgc

SEQ ID NO: 5687 - DNA, 18 bp, Homo sapiens
gcggactcgggttgccct

SEQ ID NO: 5688 - DNA, 16 bp, Homo sapiens
gcggactgaaggagac

SEQ ID NO: 5689 - DNA, 17 bp, Homo sapiens
gcggactgacgggcgcc

SEQ ID NO: 5690 - DNA, 18 bp, Homo sapiens
gcggactgccctttccca

SEQ ID NO: 5691 - DNA, 19 bp, Homo sapiens
gcggactgctagaggcggc

SEQ ID NO: 5692 - DNA, 17 bp, Homo sapiens
gcggacttccgaggccg

SEQ ID NO: 5693 - DNA, 17 bp, Homo sapiens
gcggagaagaagaggta

SEQ ID NO: 5694 - DNA, 18 bp, Homo sapiens
gcggagaagctggagtga

SEQ ID NO: 5695 - DNA, 17 bp, Homo sapiens
aggtgccggggagccct

SEQ ID NO: 5696 - DNA, 19 bp, Homo sapiens
aggtgcgcgcctttagggc

SEQ ID NO: 5697 - DNA, 16 bp, Homo sapiens
aggtgcgggcgcctgc

SEQ ID NO: 5698 - DNA, 16 bp, Homo sapiens
aggtgcttgtgttttt

SEQ ID NO: 5699 - DNA, 18 bp, Homo sapiens
aggtggagctggtggtcc

SEQ ID NO: 5700 - DNA, 17 bp, Homo sapiens
aggtggagggtggaacg

SEQ ID NO: 5701 - DNA, 21 bp, Homo sapiens
aggtggaggttgtggaattcg

SEQ ID NO: 5702 - DNA, 18 bp, Homo sapiens
aggtggcggaactgctgc

SEQ ID NO: 5703 - DNA, 18 bp, Homo sapiens
aggtggcggaggagagcc

SEQ ID NO: 5704 - DNA, 18 bp, Homo sapiens
aggtgggaggcgacactg

SEQ ID NO: 5705 - DNA, 17 bp, Homo sapiens
aggtgggagtcggagcg

SEQ ID NO: 5706 - DNA, 18 bp, Homo sapiens
aggtgggagtcggagcga

SEQ ID NO: 5707 - DNA, 24 bp, Homo sapiens
aggtggggcggtgaaagaagtttg

SEQ ID NO: 5708 - DNA, 19 bp, Homo sapiens
aggtggtgaggagagctgg

SEQ ID NO: 5709 - DNA, 19 bp, Homo sapiens
aggtggtggggctgagccg

SEQ ID NO: 5710 - DNA, 18 bp, Homo sapiens
aggtgtcggccggcgggg

SEQ ID NO: 5711 - DNA, 17 bp, Homo sapiens
aggtgtgggacgggcgg

SEQ ID NO: 5712 - DNA, 18 bp, Homo sapiens
aggtgtggggcagggtga

SEQ ID NO: 5713 - DNA, 16 bp, Homo sapiens
aggttatcgttaggca

SEQ ID NO: 5714 - DNA, 18 bp, Homo sapiens
aggttatgtgggagccgg

SEQ ID NO: 5715 - DNA, 16 bp, Homo sapiens
aggttcgggtagtcgg

SEQ ID NO: 5716 - DNA, 18 bp, Homo sapiens
aggttctagtgtcggagt

SEQ ID NO: 5717 - DNA, 19 bp, Homo sapiens
aggttctgagcgttgtctg

SEQ ID NO: 5718 - DNA, 18 bp, Homo sapiens
aggttctgcggcacggga

SEQ ID NO: 5719 - DNA, 22 bp, Homo sapiens
aggttgggagtggaaggtggtg

SEQ ID NO: 5720 - DNA, 16 bp, Homo sapiens
aggtttcggagcacta

SEQ ID NO: 5721 - DNA, 16 bp, Homo sapiens
aggtttcgtcgggggc

SEQ ID NO: 5722 - DNA, 20 bp, Homo sapiens
aggtttctaaaacatgacgg

SEQ ID NO: 5723 - DNA, 17 bp, Homo sapiens
aggttttcggaccgcgg

SEQ ID NO: 5724 - DNA, 21 bp, Homo sapiens
agtaagtaagcctgccagaca

SEQ ID NO: 5725 - DNA, 20 bp, Homo sapiens
agtaagttgtgaccagtatg

SEQ ID NO: 5726 - DNA, 22 bp, Homo sapiens
agtacaagacatgtctgggcgc

SEQ ID NO: 5727 - DNA, 19 bp, Homo sapiens
agtaccgggactcctccac

SEQ ID NO: 5728 - DNA, 19 bp, Homo sapiens
agtagaagctgcactgggg

SEQ ID NO: 5729 - DNA, 18 bp, Homo sapiens
agtagacagcagaaccag

SEQ ID NO: 5730 - DNA, 18 bp, Homo sapiens
agtagacggacagaggag

SEQ ID NO: 5731 - DNA, 18 bp, Homo sapiens
agtagcccctctacctcc

SEQ ID NO: 5732 - DNA, 17 bp, Homo sapiens
agtagccgcggacctcg

SEQ ID NO: 5733 - DNA, 22 bp, Homo sapiens
agtagcggaggggaggtcgtga

SEQ ID NO: 5734 - DNA, 17 bp, Homo sapiens
agtagcggcgctgcgcg

SEQ ID NO: 5735 - DNA, 16 bp, Homo sapiens
agtaggccggcgcctg

SEQ ID NO: 5736 - DNA, 16 bp, Homo sapiens
agtaggtccgttggtc

SEQ ID NO: 5737 - DNA, 22 bp, Homo sapiens
agtagttaggatggctgaaggg

SEQ ID NO: 5738 - DNA, 22 bp, Homo sapiens
agtatgggtttcagggatccta

SEQ ID NO: 5739 - DNA, 19 bp, Homo sapiens
agtatgttggagttggtgg

SEQ ID NO: 5740 - DNA, 19 bp, Homo sapiens
agtcaagatggtggggccc

SEQ ID NO: 5741 - DNA, 18 bp, Homo sapiens
agtcactcgcagggagct

SEQ ID NO: 5742 - DNA, 18 bp, Homo sapiens
agtcagacgctggggatg

SEQ ID NO: 5743 - DNA, 20 bp, Homo sapiens
agtcagagttgagagacaga

SEQ ID NO: 5744 - DNA, 18 bp, Homo sapiens
agtcagtccggaggctgc

SEQ ID NO: 5745 - DNA, 18 bp, Homo sapiens
agtcagtggtgtggggtg

SEQ ID NO: 5746 - DNA, 16 bp, Homo sapiens
agtcatggcggatggt

SEQ ID NO: 5747 - DNA, 16 bp, Homo sapiens
agtcatggcggctcag

SEQ ID NO: 5748 - DNA, 19 bp, Homo sapiens
agtccccagtgggccgcca

SEQ ID NO: 5749 - DNA, 19 bp, Homo sapiens
agtcccggcaaaaaccccg

SEQ ID NO: 5750 - DNA, 17 bp, Homo sapiens
agtccctcagtgcgcat

SEQ ID NO: 5751 - DNA, 23 bp, Homo sapiens
agtccgaggagggtcacgcaggc

SEQ ID NO: 5752 - DNA, 18 bp, Homo sapiens
gcggagaaggtaaaccag

SEQ ID NO: 5753 - DNA, 18 bp, Homo sapiens
gcggagaccgaaggctgg

SEQ ID NO: 5754 - DNA, 16 bp, Homo sapiens
gcggagaccgcagccc

SEQ ID NO: 5755 - DNA, 19 bp, Homo sapiens
gcggagaccgtctggagca

SEQ ID NO: 5756 - DNA, 16 bp, Homo sapiens
gcggagacgcttctgg

SEQ ID NO: 5757 - DNA, 20 bp, Homo sapiens
gcggagactagagcggccgc

SEQ ID NO: 5758 - DNA, 16 bp, Homo sapiens
gcggagactgaggtcc

SEQ ID NO: 5759 - DNA, 24 bp, Homo sapiens
gcggagagaggctgagacggagaa

SEQ ID NO: 5760 - DNA, 17 bp, Homo sapiens
gcggagagcggaccgac

SEQ ID NO: 5761 - DNA, 18 bp, Homo sapiens
gcggagagcggctgatcg

SEQ ID NO: 5762 - DNA, 19 bp, Homo sapiens
gcggagagcggctgatcgc

SEQ ID NO: 5763 - DNA, 18 bp, Homo sapiens
gcggagagctgggcagtg

SEQ ID NO: 5764 - DNA, 18 bp, Homo sapiens
gcggagaggcaagagcag

SEQ ID NO: 5765 - DNA, 16 bp, Homo sapiens
gcggagagtcgccgcc

SEQ ID NO: 5766 - DNA, 18 bp, Homo sapiens
gcggagcaagagtgagtg

SEQ ID NO: 5767 - DNA, 21 bp, Homo sapiens
gcggagcagtggtcggagatg

SEQ ID NO: 5768 - DNA, 17 bp, Homo sapiens
gcggagcatttcggctc

SEQ ID NO: 5769 - DNA, 18 bp, Homo sapiens
gcggagccagaacgcggt

SEQ ID NO: 5770 - DNA, 18 bp, Homo sapiens
gcggagccatgcagtacc

SEQ ID NO: 5771 - DNA, 18 bp, Homo sapiens
gcggagcccagagggcgg

SEQ ID NO: 5772 - DNA, 19 bp, Homo sapiens
gcggagccggcagcgcagg

SEQ ID NO: 5773 - DNA, 20 bp, Homo sapiens
gcggagcgaacgggaccggc

SEQ ID NO: 5774 - DNA, 21 bp, Homo sapiens
gcggagcgaacgggaccggcc

SEQ ID NO: 5775 - DNA, 16 bp, Homo sapiens
gcggagcgaagagaac

SEQ ID NO: 5776 - DNA, 19 bp, Homo sapiens
gcggagcgaagagaaccgg

SEQ ID NO: 5777 - DNA, 20 bp, Homo sapiens
gcggagcgaagagaaccggt

SEQ ID NO: 5778 - DNA, 18 bp, Homo sapiens
gcggagcgagctagcctg

SEQ ID NO: 5779 - DNA, 18 bp, Homo sapiens
gcggagcgagtgggagcg

SEQ ID NO: 5780 - DNA, 18 bp, Homo sapiens
gcggagcggacggacgcg

SEQ ID NO: 5781 - DNA, 18 bp, Homo sapiens
gcggagcggagcggcggc

SEQ ID NO: 5782 - DNA, 21 bp, Homo sapiens
gcggagcggagctgtgaggcg

SEQ ID NO: 5783 - DNA, 18 bp, Homo sapiens
gcggagcggccggagctg

SEQ ID NO: 5784 - DNA, 17 bp, Homo sapiens
gcggagcggcggatctg

SEQ ID NO: 5785 - DNA, 17 bp, Homo sapiens
gcggagcggcggcggcg

SEQ ID NO: 5786 - DNA, 17 bp, Homo sapiens
gcggagcggcgggacct

SEQ ID NO: 5787 - DNA, 17 bp, Homo sapiens
gcggagcgggagaaggg

SEQ ID NO: 5788 - DNA, 18 bp, Homo sapiens
gcggagctccaagcccgg

SEQ ID NO: 5789 - DNA, 20 bp, Homo sapiens
gcggagctgcggttggcttg

SEQ ID NO: 5790 - DNA, 19 bp, Homo sapiens
gcggagctggcggcagtga

SEQ ID NO: 5791 - DNA, 19 bp, Homo sapiens
gcggagctgggcgaagccg

SEQ ID NO: 5792 - DNA, 20 bp, Homo sapiens
gcggagctgtgaggcgccag

SEQ ID NO: 5793 - DNA, 19 bp, Homo sapiens
gcggaggaagtgaggacgg

SEQ ID NO: 5794 - DNA, 16 bp, Homo sapiens
gcggaggacaggggca

SEQ ID NO: 5795 - DNA, 18 bp, Homo sapiens
gcggaggagattttcgga

SEQ ID NO: 5796 - DNA, 18 bp, Homo sapiens
gcggaggagcagcgacac

SEQ ID NO: 5797 - DNA, 18 bp, Homo sapiens
gcggaggagcccggactg

SEQ ID NO: 5798 - DNA, 19 bp, Homo sapiens
gcggaggagcccggactgc

SEQ ID NO: 5799 - DNA, 19 bp, Homo sapiens
gcggaggagccgcgagcgc

SEQ ID NO: 5800 - DNA, 17 bp, Homo sapiens
gcggaggagcggtaact

SEQ ID NO: 5801 - DNA, 18 bp, Homo sapiens
gcggaggagcggtaacta

SEQ ID NO: 5802 - DNA, 19 bp, Homo sapiens
gcggaggagcggtaactac

SEQ ID NO: 5803 - DNA, 18 bp, Homo sapiens
gcggaggaggagaaagga

SEQ ID NO: 5804 - DNA, 18 bp, Homo sapiens
gcggaggaggcgaattag

SEQ ID NO: 5805 - DNA, 20 bp, Homo sapiens
gcggaggcccgggccacacc

SEQ ID NO: 5806 - DNA, 20 bp, Homo sapiens
gcggaggcggaggcttgggg

SEQ ID NO: 5807 - DNA, 20 bp, Homo sapiens
gcggaggcggagtcgagtca

SEQ ID NO: 5808 - DNA, 18 bp, Homo sapiens
gcggaggcggctagaagg

SEQ ID NO: 5809 - DNA, 22 bp, Homo sapiens
agtccggaggtgaggcggaact

SEQ ID NO: 5810 - DNA, 20 bp, Homo sapiens
agtccggccggcgccatgaa

SEQ ID NO: 5811 - DNA, 19 bp, Homo sapiens
agtccgtcagttgctccgc

SEQ ID NO: 5812 - DNA, 17 bp, Homo sapiens
agtcctccaggcgtcgg

SEQ ID NO: 5813 - DNA, 16 bp, Homo sapiens
agtcgaccgtgtccgc

SEQ ID NO: 5814 - DNA, 20 bp, Homo sapiens
agtcgactgttgcgcgtgcg

SEQ ID NO: 5815 - DNA, 20 bp, Homo sapiens
agtcgagatggaggaagatg

SEQ ID NO: 5816 - DNA, 20 bp, Homo sapiens
agtcgagccgcgctcacctc

SEQ ID NO: 5817 - DNA, 18 bp, Homo sapiens
agtcgcccccggcgcgga

SEQ ID NO: 5818 - DNA, 18 bp, Homo sapiens
agtcgccggtggccgcgg

SEQ ID NO: 5819 - DNA, 18 bp, Homo sapiens
agtcgccgtcaggcactg

SEQ ID NO: 5820 - DNA, 17 bp, Homo sapiens
agtcgcgagcgaacgac

SEQ ID NO: 5821 - DNA, 19 bp, Homo sapiens
agtcgcgcagctgtgttcg

SEQ ID NO: 5822 - DNA, 21 bp, Homo sapiens
agtcgcgcagctgtgttcgcg

SEQ ID NO: 5823 - DNA, 16 bp, Homo sapiens
agtcgcggggcaggta

SEQ ID NO: 5824 - DNA, 18 bp, Homo sapiens
agtcgcgtagctgagccc

SEQ ID NO: 5825 - DNA, 17 bp, Homo sapiens
agtcgctgcggggctga

SEQ ID NO: 5826 - DNA, 20 bp, Homo sapiens
agtcggagcgaggtggcgag

SEQ ID NO: 5827 - DNA, 16 bp, Homo sapiens
agtcggctgcagacgg

SEQ ID NO: 5828 - DNA, 19 bp, Homo sapiens
agtcgggaaatggccgctg

SEQ ID NO: 5829 - DNA, 18 bp, Homo sapiens
agtcgggagaggacgggg

SEQ ID NO: 5830 - DNA, 18 bp, Homo sapiens
agtcggggcggcagctga

SEQ ID NO: 5831 - DNA, 19 bp, Homo sapiens
agtcgtaggcgctggccgc

SEQ ID NO: 5832 - DNA, 16 bp, Homo sapiens
agtcgttccgccacct

SEQ ID NO: 5833 - DNA, 20 bp, Homo sapiens
agtctaaggcactgagcgta

SEQ ID NO: 5834 - DNA, 18 bp, Homo sapiens
agtctaaggtagggtccg

SEQ ID NO: 5835 - DNA, 17 bp, Homo sapiens
agtctagctcggcgctg

SEQ ID NO: 5836 - DNA, 19 bp, Homo sapiens
agtctcctcgccgggagcg

SEQ ID NO: 5837 - DNA, 16 bp, Homo sapiens
agtctcgagctctcgc

SEQ ID NO: 5838 - DNA, 18 bp, Homo sapiens
agtctctcggctcaagga

SEQ ID NO: 5839 - DNA, 19 bp, Homo sapiens
agtctctcgtcatggaata

SEQ ID NO: 5840 - DNA, 20 bp, Homo sapiens
agtctctcgtcatggaatac

SEQ ID NO: 5841 - DNA, 20 bp, Homo sapiens
agtctctttcacccatggga

SEQ ID NO: 5842 - DNA, 18 bp, Homo sapiens
agtctgaggcgaagcttc

SEQ ID NO: 5843 - DNA, 18 bp, Homo sapiens
agtgaacgtgatctcggg

SEQ ID NO: 5844 - DNA, 18 bp, Homo sapiens
agtgaccctctggaacgg

SEQ ID NO: 5845 - DNA, 21 bp, Homo sapiens
agtgacgatggtgatcgttgc

SEQ ID NO: 5846 - DNA, 16 bp, Homo sapiens
agtgacgggtctggag

SEQ ID NO: 5847 - DNA, 23 bp, Homo sapiens
agtgactcatctcgggcagagcg

SEQ ID NO: 5848 - DNA, 18 bp, Homo sapiens
agtgagagagttggttgg

SEQ ID NO: 5849 - DNA, 18 bp, Homo sapiens
agtgagtgcctggggcag

SEQ ID NO: 5850 - DNA, 17 bp, Homo sapiens
agtgagttgcgaactcc

SEQ ID NO: 5851 - DNA, 19 bp, Homo sapiens
agtgagttgcgaactccgc

SEQ ID NO: 5852 - DNA, 19 bp, Homo sapiens
agtgatgacgcgactctca

SEQ ID NO: 5853 - DNA, 18 bp, Homo sapiens
agtgattctcggggccac

SEQ ID NO: 5854 - DNA, 21 bp, Homo sapiens
agtgcaaatatccaagaagag

SEQ ID NO: 5855 - DNA, 18 bp, Homo sapiens
agtgcactcaacagaacg

SEQ ID NO: 5856 - DNA, 22 bp, Homo sapiens
agtgcaggcgcccaagccgccg

SEQ ID NO: 5857 - DNA, 20 bp, Homo sapiens
agtgccggagcctccgcgag

SEQ ID NO: 5858 - DNA, 20 bp, Homo sapiens
agtgccggccacagagatgg

SEQ ID NO: 5859 - DNA, 18 bp, Homo sapiens
agtgccgtagtagcgggc

SEQ ID NO: 5860 - DNA, 23 bp, Homo sapiens
agtgcgcggaggggcgcgggtcc

SEQ ID NO: 5861 - DNA, 21 bp, Homo sapiens
agtgcggagccttaggcggag

SEQ ID NO: 5862 - DNA, 19 bp, Homo sapiens
agtgcggcgccaccgcgga

SEQ ID NO: 5863 - DNA, 22 bp, Homo sapiens
agtgcgtagcagggtggagtcg

SEQ ID NO: 5864 - DNA, 18 bp, Homo sapiens
agtgcgtcgagctcgccg

SEQ ID NO: 5865 - DNA, 15 bp, Homo sapiens
agtgcgtcggctgct

SEQ ID NO: 5866 - DNA, 17 bp, Homo sapiens
gcggaggctacgaaact

SEQ ID NO: 5867 - DNA, 18 bp, Homo sapiens
gcggaggctgaggcagca

SEQ ID NO: 5868 - DNA, 17 bp, Homo sapiens
gcggaggctgagggcgc

SEQ ID NO: 5869 - DNA, 16 bp, Homo sapiens
gcggagggagcaaggg

SEQ ID NO: 5870 - DNA, 18 bp, Homo sapiens
gcggagggataatcgggg

SEQ ID NO: 5871 - DNA, 19 bp, Homo sapiens
gcggagggggaggtggctg

SEQ ID NO: 5872 - DNA, 15 bp, Homo sapiens
gcggaggtacgctga

SEQ ID NO: 5873 - DNA, 19 bp, Homo sapiens
gcggaggtgagtgcatggt

SEQ ID NO: 5874 - DNA, 18 bp, Homo sapiens
gcggaggtgggaggcgac

SEQ ID NO: 5875 - DNA, 18 bp, Homo sapiens
gcggagtagacggaggag

SEQ ID NO: 5876 - DNA, 19 bp, Homo sapiens
gcggagtagacggaggagg

SEQ ID NO: 5877 - DNA, 24 bp, Homo sapiens
gcggagtaggatgaggcccgcggc

SEQ ID NO: 5878 - DNA, 19 bp, Homo sapiens
gcggagtcggccggagcct

SEQ ID NO: 5879 - DNA, 19 bp, Homo sapiens
gcggagtgactcggcggcc

SEQ ID NO: 5880 - DNA, 18 bp, Homo sapiens
gcggagtggccttgccac

SEQ ID NO: 5881 - DNA, 21 bp, Homo sapiens
gcggagtgggcgagcgagcac

SEQ ID NO: 5882 - DNA, 20 bp, Homo sapiens
gcggagtgttggtgagtgac

SEQ ID NO: 5883 - DNA, 17 bp, Homo sapiens
gcggagttggcggcttg

SEQ ID NO: 5884 - DNA, 18 bp, Homo sapiens
gcggagttggctgctggg

SEQ ID NO: 5885 - DNA, 18 bp, Homo sapiens
gcggagttttccgcccgg

SEQ ID NO: 5886 - DNA, 18 bp, Homo sapiens
gcggatcagagagggcta

SEQ ID NO: 5887 - DNA, 16 bp, Homo sapiens
gcggatccagaaggta

SEQ ID NO: 5888 - DNA, 17 bp, Homo sapiens
gcggatcccccggtggc

SEQ ID NO: 5889 - DNA, 17 bp, Homo sapiens
gcggatcgggtgttgca

SEQ ID NO: 5890 - DNA, 16 bp, Homo sapiens
gcggatctcagaaggc

SEQ ID NO: 5891 - DNA, 19 bp, Homo sapiens
gcggatctgaggttcggcg

SEQ ID NO: 5892 - DNA, 19 bp, Homo sapiens
gcggatgaagccacgcgac

SEQ ID NO: 5893 - DNA, 17 bp, Homo sapiens
gcggatgagggaagggc

SEQ ID NO: 5894 - DNA, 18 bp, Homo sapiens
gcggatgagggtaggtga

SEQ ID NO: 5895 - DNA, 20 bp, Homo sapiens
gcggatgcggaaggtaaggg

SEQ ID NO: 5896 - DNA, 16 bp, Homo sapiens
gcggatggagcaggat

SEQ ID NO: 5897 - DNA, 18 bp, Homo sapiens
gcggatggcagaggaagg

SEQ ID NO: 5898 - DNA, 21 bp, Homo sapiens
gcggatggcagaggaaggagg

SEQ ID NO: 5899 - DNA, 18 bp, Homo sapiens
gcggatgtgaggggcgcc

SEQ ID NO: 5900 - DNA, 19 bp, Homo sapiens
gcggattataacaggtatg

SEQ ID NO: 5901 - DNA, 18 bp, Homo sapiens
gcggattctgaggcggct

SEQ ID NO: 5902 - DNA, 18 bp, Homo sapiens
gcggcaaaaggggattat

SEQ ID NO: 5903 - DNA, 21 bp, Homo sapiens
gcggcaaagacgacacggcct

SEQ ID NO: 5904 - DNA, 18 bp, Homo sapiens
gcggcaaagggaagcagg

SEQ ID NO: 5905 - DNA, 17 bp, Homo sapiens
gcggcaagagcggagct

SEQ ID NO: 5906 - DNA, 23 bp, Homo sapiens
gcggcaagatggcggcctgaacg

SEQ ID NO: 5907 - DNA, 22 bp, Homo sapiens
gcggcaaggacgagccggggcg

SEQ ID NO: 5908 - DNA, 17 bp, Homo sapiens
gcggcaaggagcgagtg

SEQ ID NO: 5909 - DNA, 22 bp, Homo sapiens
gcggcaccgcggtgcgcaagcg

SEQ ID NO: 5910 - DNA, 16 bp, Homo sapiens
gcggcacggaggagcc

SEQ ID NO: 5911 - DNA, 18 bp, Homo sapiens
gcggcactgttgtcattt

SEQ ID NO: 5912 - DNA, 18 bp, Homo sapiens
gcggcactttcctcttcc

SEQ ID NO: 5913 - DNA, 16 bp, Homo sapiens
gcggcagacaacaggg

SEQ ID NO: 5914 - DNA, 18 bp, Homo sapiens
gcggcagagacagaagag

SEQ ID NO: 5915 - DNA, 18 bp, Homo sapiens
gcggcagagctgagctgc

SEQ ID NO: 5916 - DNA, 21 bp, Homo sapiens
gcggcagaggccgggctgaga

SEQ ID NO: 5917 - DNA, 16 bp, Homo sapiens
gcggcagccgcgaact

SEQ ID NO: 5918 - DNA, 19 bp, Homo sapiens
gcggcagcgagttgaactt

SEQ ID NO: 5919 - DNA, 16 bp, Homo sapiens
gcggcagcgatggatg

SEQ ID NO: 5920 - DNA, 19 bp, Homo sapiens
gcggcagcgcgaggccggg

SEQ ID NO: 5921 - DNA, 19 bp, Homo sapiens
gcggcagcggcggatggac

SEQ ID NO: 5922 - DNA, 18 bp, Homo sapiens
gcggcagcggctcttata

SEQ ID NO: 5923 - DNA, 19 bp, Homo sapiens
agtgctagcgctcctctcc

SEQ ID NO: 5924 - DNA, 19 bp, Homo sapiens
agtgctcggaaaatggcct

SEQ ID NO: 5925 - DNA, 22 bp, Homo sapiens
agtgctctatcttgttgccgga

SEQ ID NO: 5926 - DNA, 17 bp, Homo sapiens
agtgctgtcagaacggc

SEQ ID NO: 5927 - DNA, 22 bp, Homo sapiens
agtgctgtcagaacggccgatc

SEQ ID NO: 5928 - DNA, 18 bp, Homo sapiens
agtgcttttgaatgaggt

SEQ ID NO: 5929 - DNA, 18 bp, Homo sapiens
agtggagttcgctgcgcg

SEQ ID NO: 5930 - DNA, 18 bp, Homo sapiens
agtggatcgtgcggagca

SEQ ID NO: 5931 - DNA, 19 bp, Homo sapiens
agtggcagcggaggcctgt

SEQ ID NO: 5932 - DNA, 20 bp, Homo sapiens
agtggcccctcgcgcgggcg

SEQ ID NO: 5933 - DNA, 18 bp, Homo sapiens
agtggcccgcgggccgac

SEQ ID NO: 5934 - DNA, 18 bp, Homo sapiens
agtggcgagtagtggaaa

SEQ ID NO: 5935 - DNA, 18 bp, Homo sapiens
agtggcgggccgactgtg

SEQ ID NO: 5936 - DNA, 16 bp, Homo sapiens
agtggcgggccgctga

SEQ ID NO: 5937 - DNA, 20 bp, Homo sapiens
agtggcgtagacgagttaag

SEQ ID NO: 5938 - DNA, 19 bp, Homo sapiens
agtggctggtaggcagtgg

SEQ ID NO: 5939 - DNA, 17 bp, Homo sapiens
agtgggagtgcgacccc

SEQ ID NO: 5940 - DNA, 18 bp, Homo sapiens
agtgggcagcccgatttt

SEQ ID NO: 5941 - DNA, 18 bp, Homo sapiens
agtgggcgccatcttctt

SEQ ID NO: 5942 - DNA, 22 bp, Homo sapiens
agtgggcgggagcggggaaaac

SEQ ID NO: 5943 - DNA, 19 bp, Homo sapiens
agtgggctgtgtttgaggc

SEQ ID NO: 5944 - DNA, 16 bp, Homo sapiens
agtgggtatagaaggg

SEQ ID NO: 5945 - DNA, 20 bp, Homo sapiens
agtggtactgaggcagacgt

SEQ ID NO: 5946 - DNA, 19 bp, Homo sapiens
agtggtcgtcgtcgcggca

SEQ ID NO: 5947 - DNA, 17 bp, Homo sapiens
agtggtgagtcgtgata

SEQ ID NO: 5948 - DNA, 16 bp, Homo sapiens
agtgtcatgtcggatt

SEQ ID NO: 5949 - DNA, 21 bp, Homo sapiens
agtgtcccgcgctggggagta

SEQ ID NO: 5950 - DNA, 18 bp, Homo sapiens
agtgtcccttctctcagc

SEQ ID NO: 5951 - DNA, 19 bp, Homo sapiens
agtgtcgccgccgccttcc

SEQ ID NO: 5952 - DNA, 18 bp, Homo sapiens
agtgtcgctctgcattga

SEQ ID NO: 5953 - DNA, 18 bp, Homo sapiens
agtgtcgggcgcggcagg

SEQ ID NO: 5954 - DNA, 18 bp, Homo sapiens
agtgtcgtggacgccgtg

SEQ ID NO: 5955 - DNA, 17 bp, Homo sapiens
agtgtctcttagcagcg

SEQ ID NO: 5956 - DNA, 18 bp, Homo sapiens
agtgtctgtggtggccgc

SEQ ID NO: 5957 - DNA, 20 bp, Homo sapiens
agtgtgagacgagcaccccg

SEQ ID NO: 5958 - DNA, 18 bp, Homo sapiens
agtgtgaggagctgctat

SEQ ID NO: 5959 - DNA, 19 bp, Homo sapiens
agtgtggaggcgggagccc

SEQ ID NO: 5960 - DNA, 19 bp, Homo sapiens
agtgtggaggtcgttggag

SEQ ID NO: 5961 - DNA, 19 bp, Homo sapiens
agtgtggctgaagcagcga

SEQ ID NO: 5962 - DNA, 22 bp, Homo sapiens
agtgtggcttcgtttacagttc

SEQ ID NO: 5963 - DNA, 21 bp, Homo sapiens
agtgtgtgcgccgggagctgg

SEQ ID NO: 5964 - DNA, 19 bp, Homo sapiens
agtgtgtgggcggcggcgg

SEQ ID NO: 5965 - DNA, 18 bp, Homo sapiens
agtgttgggcccgcgggg

SEQ ID NO: 5966 - DNA, 18 bp, Homo sapiens
agtgttttggggcacaga

SEQ ID NO: 5967 - DNA, 18 bp, Homo sapiens
agttaaggcggcacaggg

SEQ ID NO: 5968 - DNA, 20 bp, Homo sapiens
agttagaagtggactggcca

SEQ ID NO: 5969 - DNA, 18 bp, Homo sapiens
agttagagcccgtgcgga

SEQ ID NO: 5970 - DNA, 24 bp, Homo sapiens
agttcaagggcgagagtgagtacc

SEQ ID NO: 5971 - DNA, 17 bp, Homo sapiens
agttccacctccttggc

SEQ ID NO: 5972 - DNA, 18 bp, Homo sapiens
agttccagcgcagctaga

SEQ ID NO: 5973 - DNA, 19 bp, Homo sapiens
agttccagcgcagctagac

SEQ ID NO: 5974 - DNA, 18 bp, Homo sapiens
agttcccaagggcggaaa

SEQ ID NO: 5975 - DNA, 23 bp, Homo sapiens
agttccccgcttcccttccgcgg

SEQ ID NO: 5976 - DNA, 18 bp, Homo sapiens
agttcccggagaaaggaa

SEQ ID NO: 5977 - DNA, 18 bp, Homo sapiens
agttccgcgcgcaggcca

SEQ ID NO: 5978 - DNA, 14 bp, Homo sapiens
agttcggcggtccc

SEQ ID NO: 5979 - DNA, 21 bp, Homo sapiens
agttcgggcggaggccgggcc

SEQ ID NO: 5980 - DNA, 16 bp, Homo sapiens
gcggcagctgcgaggc

SEQ ID NO: 5981 - DNA, 20 bp, Homo sapiens
gcggcagctgcgggcgccgg

SEQ ID NO: 5982 - DNA, 16 bp, Homo sapiens
gcggcagctgtggccc

SEQ ID NO: 5983 - DNA, 18 bp, Homo sapiens
gcggcaggagaagcaaga

SEQ ID NO: 5984 - DNA, 18 bp, Homo sapiens
gcggcaggagcaggacct

SEQ ID NO: 5985 - DNA, 19 bp, Homo sapiens
gcggcaggagcaggacctg

SEQ ID NO: 5986 - DNA, 18 bp, Homo sapiens
gcggcagggaccagcagt

SEQ ID NO: 5987 - DNA, 21 bp, Homo sapiens
gcggcagggactacaccggtg

SEQ ID NO: 5988 - DNA, 22 bp, Homo sapiens
gcggcagtagggacagcaggag

SEQ ID NO: 5989 - DNA, 20 bp, Homo sapiens
gcggcagtggagaagcggcg

SEQ ID NO: 5990 - DNA, 22 bp, Homo sapiens
gcggcagtggctccgaggggac

SEQ ID NO: 5991 - DNA, 16 bp, Homo sapiens
gcggcagttgtggtgg

SEQ ID NO: 5992 - DNA, 21 bp, Homo sapiens
gcggcagtttaattctccggc

SEQ ID NO: 5993 - DNA, 17 bp, Homo sapiens
gcggcatactcagcggc

SEQ ID NO: 5994 - DNA, 18 bp, Homo sapiens
gcggcatcccgcgcggcc

SEQ ID NO: 5995 - DNA, 20 bp, Homo sapiens
gcggcatgggcccgggccac

SEQ ID NO: 5996 - DNA, 17 bp, Homo sapiens
gcggcatggggcgagtg

SEQ ID NO: 5997 - DNA, 18 bp, Homo sapiens
gcggcattgccagccggc

SEQ ID NO: 5998 - DNA, 20 bp, Homo sapiens
gcggcattgccagccggctg

SEQ ID NO: 5999 - DNA, 18 bp, Homo sapiens
gcggccaaagcggcggcg

SEQ ID NO: 6000 - DNA, 21 bp, Homo sapiens
gcggccaaagtaggttgggag

SEQ ID NO: 6001 - DNA, 19 bp, Homo sapiens
gcggccacccgcaggtctg

SEQ ID NO: 6002 - DNA, 17 bp, Homo sapiens
gcggccactgagccgga

SEQ ID NO: 6003 - DNA, 16 bp, Homo sapiens
gcggccagaaacttca

SEQ ID NO: 6004 - DNA, 16 bp, Homo sapiens
gcggccaggaacgcca

SEQ ID NO: 6005 - DNA, 18 bp, Homo sapiens
gcggccaggaacgccagc

SEQ ID NO: 6006 - DNA, 20 bp, Homo sapiens
gcggccatggcgtacgccta

SEQ ID NO: 6007 - DNA, 17 bp, Homo sapiens
gcggcccccggcgcgcc

SEQ ID NO: 6008 - DNA, 18 bp, Homo sapiens
gcggcccgaagatggcgg

SEQ ID NO: 6009 - DNA, 20 bp, Homo sapiens
gcggcccgccgtcccagacg

SEQ ID NO: 6010 - DNA, 19 bp, Homo sapiens
gcggccctcaaggctctgg

SEQ ID NO: 6011 - DNA, 18 bp, Homo sapiens
gcggccgaggcgatgagg

SEQ ID NO: 6012 - DNA, 19 bp, Homo sapiens
gcggccgcagaagcgtaga

SEQ ID NO: 6013 - DNA, 18 bp, Homo sapiens
gcggccgcagcgcccgca

SEQ ID NO: 6014 - DNA, 16 bp, Homo sapiens
gcggccgcaggggcca

SEQ ID NO: 6015 - DNA, 21 bp, Homo sapiens
gcggccgccgcagcctctgtg

SEQ ID NO: 6016 - DNA, 21 bp, Homo sapiens
gcggccgccgcgctcccagca

SEQ ID NO: 6017 - DNA, 20 bp, Homo sapiens
gcggccgcgtagaggggaca

SEQ ID NO: 6018 - DNA, 19 bp, Homo sapiens
gcggccgctgcggacggac

SEQ ID NO: 6019 - DNA, 21 bp, Homo sapiens
gcggccggacccagactggta

SEQ ID NO: 6020 - DNA, 18 bp, Homo sapiens
gcggccggagctgcggtg

SEQ ID NO: 6021 - DNA, 19 bp, Homo sapiens
gcggccgggcacgcaccgc

SEQ ID NO: 6022 - DNA, 18 bp, Homo sapiens
gcggccggtactgttgaa

SEQ ID NO: 6023 - DNA, 18 bp, Homo sapiens
gcggccggtgcagccgca

SEQ ID NO: 6024 - DNA, 16 bp, Homo sapiens
gcggccgtttgcagct

SEQ ID NO: 6025 - DNA, 19 bp, Homo sapiens
gcggcctgaacgcagctgg

SEQ ID NO: 6026 - DNA, 20 bp, Homo sapiens
gcggcctgaggtggagggtt

SEQ ID NO: 6027 - DNA, 21 bp, Homo sapiens
gcggcctgctgggcgggctga

SEQ ID NO: 6028 - DNA, 21 bp, Homo sapiens
gcggcctgggttgggctttgt

SEQ ID NO: 6029 - DNA, 17 bp, Homo sapiens
gcggcctgtgacgcgca

SEQ ID NO: 6030 - DNA, 18 bp, Homo sapiens
gcggcctgtgcgagtagg

SEQ ID NO: 6031 - DNA, 17 bp, Homo sapiens
gcggcgaaggcagcggc

SEQ ID NO: 6032 - DNA, 18 bp, Homo sapiens
gcggcgaaggcagcggca

SEQ ID NO: 6033 - DNA, 16 bp, Homo sapiens
gcggcgacagagcatc

SEQ ID NO: 6034 - DNA, 19 bp, Homo sapiens
gcggcgacagcctgggcgg

SEQ ID NO: 6035 - DNA, 18 bp, Homo sapiens
gcggcgacgcggttgctg

SEQ ID NO: 6036 - DNA, 18 bp, Homo sapiens
gcggcgactggtgggctt

SEQ ID NO: 6037 - DNA, 18 bp, Homo sapiens
agttctctgtagtgtttg

SEQ ID NO: 6038 - DNA, 18 bp, Homo sapiens
agttctggtcgtcgtcta

SEQ ID NO: 6039 - DNA, 18 bp, Homo sapiens
agttcttctcttcccgtc

SEQ ID NO: 6040 - DNA, 17 bp, Homo sapiens
agttgagagacagaggc

SEQ ID NO: 6041 - DNA, 18 bp, Homo sapiens
agttgaggaggagggagc

SEQ ID NO: 6042 - DNA, 18 bp, Homo sapiens
agttgcatttggtaaaac

SEQ ID NO: 6043 - DNA, 21 bp, Homo sapiens
agttgcggcgcctggtgtctc

SEQ ID NO: 6044 - DNA, 20 bp, Homo sapiens
agttgcggctgccagcgaag

SEQ ID NO: 6045 - DNA, 21 bp, Homo sapiens
agttgcgggttgtcataacgg

SEQ ID NO: 6046 - DNA, 18 bp, Homo sapiens
agttgctgcagcagcagg

SEQ ID NO: 6047 - DNA, 18 bp, Homo sapiens
agttggcaggatggcaga

SEQ ID NO: 6048 - DNA, 17 bp, Homo sapiens
agttggctactcgccat

SEQ ID NO: 6049 - DNA, 19 bp, Homo sapiens
agttggctgggggccggta

SEQ ID NO: 6050 - DNA, 18 bp, Homo sapiens
agttggtgtttcgctggg

SEQ ID NO: 6051 - DNA, 19 bp, Homo sapiens
agttggttggtgttgggcc

SEQ ID NO: 6052 - DNA, 23 bp, Homo sapiens
agttggttttagaagttgcttag

SEQ ID NO: 6053 - DNA, 21 bp, Homo sapiens
agttgtggagtggcgtagacg

SEQ ID NO: 6054 - DNA, 18 bp, Homo sapiens
agttgttactcaggtgcg

SEQ ID NO: 6055 - DNA, 16 bp, Homo sapiens
agttgttccggacaca

SEQ ID NO: 6056 - DNA, 16 bp, Homo sapiens
agttgttggcgcttcc

SEQ ID NO: 6057 - DNA, 20 bp, Homo sapiens
agttgttgggctgtaatggc

SEQ ID NO: 6058 - DNA, 16 bp, Homo sapiens
agtttcctcagtgaca

SEQ ID NO: 6059 - DNA, 24 bp, Homo sapiens
agtttgcggcactgttgtcatttc

SEQ ID NO: 6060 - DNA, 21 bp, Homo sapiens
agtttgctgtcgagcggcctg

SEQ ID NO: 6061 - DNA, 17 bp, Homo sapiens
agtttggctgtggcggc

SEQ ID NO: 6062 - DNA, 20 bp, Homo sapiens
agtttgtctgaacatgagaa

SEQ ID NO: 6063 - DNA, 22 bp, Homo sapiens
agtttgttggctgcggcagcag

SEQ ID NO: 6064 - DNA, 20 bp, Homo sapiens
agttttccttgcgctctaac

SEQ ID NO: 6065 - DNA, 21 bp, Homo sapiens
agttttgaagggaggtagcat

SEQ ID NO: 6066 - DNA, 18 bp, Homo sapiens
agttttgctgccgggagt

SEQ ID NO: 6067 - DNA, 17 bp, Homo sapiens
agtttttgattctcaac

SEQ ID NO: 6068 - DNA, 17 bp, Homo sapiens
ataagaaggggaacgaa

SEQ ID NO: 6069 - DNA, 20 bp, Homo sapiens
ataagactcagagctacggc

SEQ ID NO: 6070 - DNA, 21 bp, Homo sapiens
ataagactcagagctacggcc

SEQ ID NO: 6071 - DNA, 18 bp, Homo sapiens
ataagatctaggaacccg

SEQ ID NO: 6072 - DNA, 17 bp, Homo sapiens
ataagatggcgtccgtg

SEQ ID NO: 6073 - DNA, 18 bp, Homo sapiens
ataagatggcgtccgtgg

SEQ ID NO: 6074 - DNA, 17 bp, Homo sapiens
ataagctaaaggtaccg

SEQ ID NO: 6075 - DNA, 16 bp, Homo sapiens
ataaggcggcggccat

SEQ ID NO: 6076 - DNA, 18 bp, Homo sapiens
atacagctttggcgaggt

SEQ ID NO: 6077 - DNA, 19 bp, Homo sapiens
ataccaccgtcggccgcat

SEQ ID NO: 6078 - DNA, 19 bp, Homo sapiens
atacgcaggctggtcccca

SEQ ID NO: 6079 - DNA, 19 bp, Homo sapiens
atacgggcggcgggagctg

SEQ ID NO: 6080 - DNA, 18 bp, Homo sapiens
atactgtgagagcccctc

SEQ ID NO: 6081 - DNA, 20 bp, Homo sapiens
atacttgctggtctgatcca

SEQ ID NO: 6082 - DNA, 18 bp, Homo sapiens
atagaagtcgggcggacc

SEQ ID NO: 6083 - DNA, 18 bp, Homo sapiens
atagagaagaacggaggt

SEQ ID NO: 6084 - DNA, 19 bp, Homo sapiens
atagagtaccccggcagcc

SEQ ID NO: 6085 - DNA, 19 bp, Homo sapiens
atagatcgttggagcgcaa

SEQ ID NO: 6086 - DNA, 19 bp, Homo sapiens
atagcggaccagtgagggc

SEQ ID NO: 6087 - DNA, 18 bp, Homo sapiens
atagcggctcgcgtgggt

SEQ ID NO: 6088 - DNA, 23 bp, Homo sapiens
atagctgagtggcggcggctgct

SEQ ID NO: 6089 - DNA, 16 bp, Homo sapiens
atagctgccggcggtg

SEQ ID NO: 6090 - DNA, 18 bp, Homo sapiens
atagctttctcaactatg

SEQ ID NO: 6091 - DNA, 19 bp, Homo sapiens
ataggtccggttccggggg

SEQ ID NO: 6092 - DNA, 19 bp, Homo sapiens
atagtcggagcgaggtggc

SEQ ID NO: 6093 - DNA, 22 bp, Homo sapiens
atagtgagcgctggtggcggag

SEQ ID NO: 6094 - DNA, 18 bp, Homo sapiens
gcggcgagaggaagcccg

SEQ ID NO: 6095 - DNA, 18 bp, Homo sapiens
gcggcgagcggacggctg

SEQ ID NO: 6096 - DNA, 16 bp, Homo sapiens
gcggcgagctagcgga

SEQ ID NO: 6097 - DNA, 17 bp, Homo sapiens
gcggcgaggacgagtct

SEQ ID NO: 6098 - DNA, 18 bp, Homo sapiens
gcggcgaggacgagtctg

SEQ ID NO: 6099 - DNA, 19 bp, Homo sapiens
gcggcgaggatggagggcc

SEQ ID NO: 6100 - DNA, 18 bp, Homo sapiens
gcggcgagggggacggtg

SEQ ID NO: 6101 - DNA, 19 bp, Homo sapiens
gcggcgagtcccgcggcgg

SEQ ID NO: 6102 - DNA, 18 bp, Homo sapiens
gcggcgagtgggggcgtg

SEQ ID NO: 6103 - DNA, 17 bp, Homo sapiens
gcggcgcaggagttata

SEQ ID NO: 6104 - DNA, 18 bp, Homo sapiens
gcggcgcatactgctagt

SEQ ID NO: 6105 - DNA, 19 bp, Homo sapiens
gcggcgcatactgctagtg

SEQ ID NO: 6106 - DNA, 17 bp, Homo sapiens
gcggcgcccagaggctg

SEQ ID NO: 6107 - DNA, 20 bp, Homo sapiens
gcggcgcccagaggctgctg

SEQ ID NO: 6108 - DNA, 19 bp, Homo sapiens
gcggcgcccatgctgcgct

SEQ ID NO: 6109 - DNA, 20 bp, Homo sapiens
gcggcgcccggagacccgcc

SEQ ID NO: 6110 - DNA, 20 bp, Homo sapiens
gcggcgcctgaggagcggga

SEQ ID NO: 6111 - DNA, 20 bp, Homo sapiens
gcggcgcgagcggctgactg

SEQ ID NO: 6112 - DNA, 18 bp, Homo sapiens
gcggcgcggcatactcag

SEQ ID NO: 6113 - DNA, 17 bp, Homo sapiens
gcggcgcggccatgaag

SEQ ID NO: 6114 - DNA, 18 bp, Homo sapiens
gcggcgcggccatgaagc

SEQ ID NO: 6115 - DNA, 17 bp, Homo sapiens
gcggcgcgtggtctacg

SEQ ID NO: 6116 - DNA, 19 bp, Homo sapiens
gcggcgcgtggtctacgcc

SEQ ID NO: 6117 - DNA, 19 bp, Homo sapiens
gcggcgctaggggaacccg

SEQ ID NO: 6118 - DNA, 23 bp, Homo sapiens
gcggcgctccgcaggggctcggc

SEQ ID NO: 6119 - DNA, 19 bp, Homo sapiens
gcggcgctgaaggaggata

SEQ ID NO: 6120 - DNA, 18 bp, Homo sapiens
gcggcgctgacagagacg

SEQ ID NO: 6121 - DNA, 20 bp, Homo sapiens
gcggcgctggaggagctcga

SEQ ID NO: 6122 - DNA, 17 bp, Homo sapiens
gcggcgctggcggccga

SEQ ID NO: 6123 - DNA, 20 bp, Homo sapiens
gcggcggagcggagcgccag

SEQ ID NO: 6124 - DNA, 22 bp, Homo sapiens
gcggcggagctggaactgctgc

SEQ ID NO: 6125 - DNA, 19 bp, Homo sapiens
gcggcggaggaagtgagga

SEQ ID NO: 6126 - DNA, 19 bp, Homo sapiens
gcggcggcaccgcgaaggg

SEQ ID NO: 6127 - DNA, 18 bp, Homo sapiens
gcggcggcagagccagag

SEQ ID NO: 6128 - DNA, 18 bp, Homo sapiens
gcggcggcagaggaggca

SEQ ID NO: 6129 - DNA, 19 bp, Homo sapiens
gcggcggcagcagcagcag

SEQ ID NO: 6130 - DNA, 18 bp, Homo sapiens
gcggcggcagccgagggc

SEQ ID NO: 6131 - DNA, 19 bp, Homo sapiens
gcggcggcaggagcaggac

SEQ ID NO: 6132 - DNA, 20 bp, Homo sapiens
gcggcggccgccattttgtg

SEQ ID NO: 6133 - DNA, 19 bp, Homo sapiens
gcggcggccgttgagggac

SEQ ID NO: 6134 - DNA, 19 bp, Homo sapiens
gcggcggcgacggcattta

SEQ ID NO: 6135 - DNA, 20 bp, Homo sapiens
gcggcggcgcagacaaaggc

SEQ ID NO: 6136 - DNA, 18 bp, Homo sapiens
gcggcggcgcggcgagcg

SEQ ID NO: 6137 - DNA, 21 bp, Homo sapiens
gcggcggcgctgcagagccca

SEQ ID NO: 6138 - DNA, 16 bp, Homo sapiens
gcggcggcggcagcgg

SEQ ID NO: 6139 - DNA, 18 bp, Homo sapiens
gcggcggcggcgcagcta

SEQ ID NO: 6140 - DNA, 23 bp, Homo sapiens
gcggcggcggcggccagcacgga

SEQ ID NO: 6141 - DNA, 22 bp, Homo sapiens
gcggcggcggcggcggcgcgcg

SEQ ID NO: 6142 - DNA, 20 bp, Homo sapiens
gcggcggcggcggctgcggc

SEQ ID NO: 6143 - DNA, 18 bp, Homo sapiens
gcggcggcggcggctgga

SEQ ID NO: 6144 - DNA, 17 bp, Homo sapiens
gcggcggcgggcgcggg

SEQ ID NO: 6145 - DNA, 18 bp, Homo sapiens
gcggcggcgggtgtactg

SEQ ID NO: 6146 - DNA, 23 bp, Homo sapiens
gcggcggctgcagcgggtgggac

SEQ ID NO: 6147 - DNA, 16 bp, Homo sapiens
gcggcgggaagatgta

SEQ ID NO: 6148 - DNA, 23 bp, Homo sapiens
gcggcgggacagacgggcgcacg

SEQ ID NO: 6149 - DNA, 17 bp, Homo sapiens
gcggcgggagcgaggtg

SEQ ID NO: 6150 - DNA, 18 bp, Homo sapiens
gcggcgggcactgacggg

SEQ ID NO: 6151 - DNA, 19 bp, Homo sapiens
atagtgcgggtagtgggtt

SEQ ID NO: 6152 - DNA, 19 bp, Homo sapiens
atagttggagcggagactg

SEQ ID NO: 6153 - DNA, 18 bp, Homo sapiens
atatcgaggcgatagggt

SEQ ID NO: 6154 - DNA, 20 bp, Homo sapiens
atatctccgagtctgggttg

SEQ ID NO: 6155 - DNA, 18 bp, Homo sapiens
atatggggggaagggtcg

SEQ ID NO: 6156 - DNA, 20 bp, Homo sapiens
atatgttaagttctatggcc

SEQ ID NO: 6157 - DNA, 19 bp, Homo sapiens
atattggatgccgcagccg

SEQ ID NO: 6158 - DNA, 17 bp, Homo sapiens
atattttccgtgtcccc

SEQ ID NO: 6159 - DNA, 18 bp, Homo sapiens
atcaaggctccggcggcg

SEQ ID NO: 6160 - DNA, 20 bp, Homo sapiens
atcacagaatgaaggcggtg

SEQ ID NO: 6161 - DNA, 20 bp, Homo sapiens
atcacagactgcggagtggg

SEQ ID NO: 6162 - DNA, 16 bp, Homo sapiens
atcaccaaaccggcca

SEQ ID NO: 6163 - DNA, 18 bp, Homo sapiens
atcaccggggctagcagg

SEQ ID NO: 6164 - DNA, 18 bp, Homo sapiens
atcacggaggctggggcc

SEQ ID NO: 6165 - DNA, 18 bp, Homo sapiens
atcagagaacggacagtg

SEQ ID NO: 6166 - DNA, 20 bp, Homo sapiens
atcagaggcttagaggcgag

SEQ ID NO: 6167 - DNA, 17 bp, Homo sapiens
atcagatcggtatggca

SEQ ID NO: 6168 - DNA, 18 bp, Homo sapiens
atcagatcggtatggcat

SEQ ID NO: 6169 - DNA, 22 bp, Homo sapiens
atcagctgacgctccgcattgc

SEQ ID NO: 6170 - DNA, 20 bp, Homo sapiens
atcaggatcggaagcctgcg

SEQ ID NO: 6171 - DNA, 18 bp, Homo sapiens
atcagggatgggaaaggg

SEQ ID NO: 6172 - DNA, 18 bp, Homo sapiens
atcaggtaggctgcgttg

SEQ ID NO: 6173 - DNA, 20 bp, Homo sapiens
atcagtggtgagtcgtgata

SEQ ID NO: 6174 - DNA, 22 bp, Homo sapiens
atcatgaagcgggctggcggcg

SEQ ID NO: 6175 - DNA, 17 bp, Homo sapiens
atcatggcggagaatca

SEQ ID NO: 6176 - DNA, 18 bp, Homo sapiens
atcatggcggagaatcac

SEQ ID NO: 6177 - DNA, 19 bp, Homo sapiens
atcatggcggctgcgctgt

SEQ ID NO: 6178 - DNA, 18 bp, Homo sapiens
atcatggtgagttggctg

SEQ ID NO: 6179 - DNA, 18 bp, Homo sapiens
atcattaaggacggaggc

SEQ ID NO: 6180 - DNA, 24 bp, Homo sapiens
atccaagaagaggaaggtgagcct

SEQ ID NO: 6181 - DNA, 18 bp, Homo sapiens
atccaagcaggtgctttg

SEQ ID NO: 6182 - DNA, 19 bp, Homo sapiens
atccacgagtggcagccgc

SEQ ID NO: 6183 - DNA, 18 bp, Homo sapiens
atcccagcctggctggca

SEQ ID NO: 6184 - DNA, 19 bp, Homo sapiens
atccccactcccacctcca

SEQ ID NO: 6185 - DNA, 21 bp, Homo sapiens
atcccctacgtagaacactga

SEQ ID NO: 6186 - DNA, 15 bp, Homo sapiens
atcccgccccccgtt

SEQ ID NO: 6187 - DNA, 19 bp, Homo sapiens
atcccggctgacgttggac

SEQ ID NO: 6188 - DNA, 21 bp, Homo sapiens
atcccggggcatacgcttgac

SEQ ID NO: 6189 - DNA, 18 bp, Homo sapiens
atcccggttgttcttctg

SEQ ID NO: 6190 - DNA, 19 bp, Homo sapiens
atccctgtacgctgcttca

SEQ ID NO: 6191 - DNA, 17 bp, Homo sapiens
atccgccaccatggtga

SEQ ID NO: 6192 - DNA, 17 bp, Homo sapiens
atccgccgcgcagtgcc

SEQ ID NO: 6193 - DNA, 18 bp, Homo sapiens
atccgctcacacacacga

SEQ ID NO: 6194 - DNA, 19 bp, Homo sapiens
atccgctgctcttgtgacg

SEQ ID NO: 6195 - DNA, 21 bp, Homo sapiens
atccgctgctgctgccgcggc

SEQ ID NO: 6196 - DNA, 17 bp, Homo sapiens
atccgctgggacccgcg

SEQ ID NO: 6197 - DNA, 24 bp, Homo sapiens
atccgggagttgaagagggctgca

SEQ ID NO: 6198 - DNA, 18 bp, Homo sapiens
atccggggtagagggaaa

SEQ ID NO: 6199 - DNA, 18 bp, Homo sapiens
atccgtagaaggcagcgc

SEQ ID NO: 6200 - DNA, 22 bp, Homo sapiens
atccgtagaaggcagcgcggcc

SEQ ID NO: 6201 - DNA, 19 bp, Homo sapiens
atccgtgtgatgggcgggc

SEQ ID NO: 6202 - DNA, 19 bp, Homo sapiens
atcctattgttagccggag

SEQ ID NO: 6203 - DNA, 16 bp, Homo sapiens
atcctcggtgctgtgg

SEQ ID NO: 6204 - DNA, 18 bp, Homo sapiens
atcctctaccgcagtcgt

SEQ ID NO: 6205 - DNA, 19 bp, Homo sapiens
atcctgacagacgccaaga

SEQ ID NO: 6206 - DNA, 15 bp, Homo sapiens
atcctgcctactacg

SEQ ID NO: 6207 - DNA, 16 bp, Homo sapiens
atccttgcggccttgc

SEQ ID NO: 6208 - DNA, 18 bp, Homo sapiens
gcggcgggccggaagccg

SEQ ID NO: 6209 - DNA, 18 bp, Homo sapiens
gcggcgggctggaggccg

SEQ ID NO: 6210 - DNA, 16 bp, Homo sapiens
gcggcgggtccggccg

SEQ ID NO: 6211 - DNA, 19 bp, Homo sapiens
gcggcgggtggcagcgatc

SEQ ID NO: 6212 - DNA, 17 bp, Homo sapiens
gcggcgggtttgctgag

SEQ ID NO: 6213 - DNA, 19 bp, Homo sapiens
gcggcggtagcagtggcaa

SEQ ID NO: 6214 - DNA, 17 bp, Homo sapiens
gcggcggtagcggcagt

SEQ ID NO: 6215 - DNA, 18 bp, Homo sapiens
gcggcggttccggagctg

SEQ ID NO: 6216 - DNA, 18 bp, Homo sapiens
gcggcggttttggctgtg

SEQ ID NO: 6217 - DNA, 20 bp, Homo sapiens
gcggcggttttggctgtgtg

SEQ ID NO: 6218 - DNA, 16 bp, Homo sapiens
gcggcgtaaacaaggc

SEQ ID NO: 6219 - DNA, 22 bp, Homo sapiens
gcggcgtaggcggaggagattt

SEQ ID NO: 6220 - DNA, 18 bp, Homo sapiens
gcggcgtccgggagcccc

SEQ ID NO: 6221 - DNA, 18 bp, Homo sapiens
gcggcgtggctgtgggtc

SEQ ID NO: 6222 - DNA, 19 bp, Homo sapiens
gcggcgttggcggcttgtg

SEQ ID NO: 6223 - DNA, 17 bp, Homo sapiens
gcggctaagagcggagg

SEQ ID NO: 6224 - DNA, 18 bp, Homo sapiens
gcggctaagcagagactg

SEQ ID NO: 6225 - DNA, 17 bp, Homo sapiens
gcggctcacacctgagc

SEQ ID NO: 6226 - DNA, 17 bp, Homo sapiens
gcggctccggcgccgag

SEQ ID NO: 6227 - DNA, 18 bp, Homo sapiens
gcggctccgggtttggca

SEQ ID NO: 6228 - DNA, 18 bp, Homo sapiens
gcggctcggctcagtcgg

SEQ ID NO: 6229 - DNA, 20 bp, Homo sapiens
gcggctctgcagagtcgaga

SEQ ID NO: 6230 - DNA, 21 bp, Homo sapiens
gcggctctgcagagtcgagag

SEQ ID NO: 6231 - DNA, 18 bp, Homo sapiens
gcggctgaggttcccgag

SEQ ID NO: 6232 - DNA, 18 bp, Homo sapiens
gcggctgcaatatggcgg

SEQ ID NO: 6233 - DNA, 18 bp, Homo sapiens
gcggctgcacgagcagtt

SEQ ID NO: 6234 - DNA, 20 bp, Homo sapiens
gcggctgcaggaggcgggcg

SEQ ID NO: 6235 - DNA, 21 bp, Homo sapiens
gcggctgcagggctccggcaa

SEQ ID NO: 6236 - DNA, 21 bp, Homo sapiens
gcggctgccgccggtgactca

SEQ ID NO: 6237 - DNA, 17 bp, Homo sapiens
gcggctgcggctgagtg

SEQ ID NO: 6238 - DNA, 18 bp, Homo sapiens
gcggctgcggggccaacg

SEQ ID NO: 6239 - DNA, 18 bp, Homo sapiens
gcggctgctcaagatgaa

SEQ ID NO: 6240 - DNA, 18 bp, Homo sapiens
gcggctgctgcgttatct

SEQ ID NO: 6241 - DNA, 20 bp, Homo sapiens
gcggctggacgagacagtgg

SEQ ID NO: 6242 - DNA, 18 bp, Homo sapiens
gcggctggagcggggtag

SEQ ID NO: 6243 - DNA, 17 bp, Homo sapiens
gcggctggcgccgctgc

SEQ ID NO: 6244 - DNA, 19 bp, Homo sapiens
gcggctggcggagcagaac

SEQ ID NO: 6245 - DNA, 20 bp, Homo sapiens
gcggctgggagcgggaagac

SEQ ID NO: 6246 - DNA, 16 bp, Homo sapiens
gcggctggtgttggcg

SEQ ID NO: 6247 - DNA, 18 bp, Homo sapiens
gcggctgtagcggggctg

SEQ ID NO: 6248 - DNA, 18 bp, Homo sapiens
gcggctgttgcctggccc

SEQ ID NO: 6249 - DNA, 20 bp, Homo sapiens
gcggcttagagggaggggct

SEQ ID NO: 6250 - DNA, 17 bp, Homo sapiens
gcggcttcgctggcgca

SEQ ID NO: 6251 - DNA, 22 bp, Homo sapiens
gcggctttgaccgagaggctgc

SEQ ID NO: 6252 - DNA, 18 bp, Homo sapiens
gcgggaaccgcaccaagc

SEQ ID NO: 6253 - DNA, 20 bp, Homo sapiens
gcgggaagcgagagtctgag

SEQ ID NO: 6254 - DNA, 18 bp, Homo sapiens
gcgggaaggctaaaacgc

SEQ ID NO: 6255 - DNA, 18 bp, Homo sapiens
gcgggacaggaggatccg

SEQ ID NO: 6256 - DNA, 18 bp, Homo sapiens
gcgggacagggacaagcg

SEQ ID NO: 6257 - DNA, 20 bp, Homo sapiens
gcgggacagggacaagcgta

SEQ ID NO: 6258 - DNA, 18 bp, Homo sapiens
gcgggaccggaagtgccg

SEQ ID NO: 6259 - DNA, 21 bp, Homo sapiens
gcgggaccgtactcgtctccc

SEQ ID NO: 6260 - DNA, 17 bp, Homo sapiens
gcgggacgcggtgcagg

SEQ ID NO: 6261 - DNA, 19 bp, Homo sapiens
gcgggacggagcttggctg

SEQ ID NO: 6262 - DNA, 20 bp, Homo sapiens
gcgggacggagcttggctgt

SEQ ID NO: 6263 - DNA, 18 bp, Homo sapiens
gcgggacgggcgtggagg

SEQ ID NO: 6264 - DNA, 18 bp, Homo sapiens
gcgggacgtgggagggtg

SEQ ID NO: 6265 - DNA, 18 bp, Homo sapiens
atcgaacgttgagcaggg

SEQ ID NO: 6266 - DNA, 21 bp, Homo sapiens
atcgaactggaggaaggaggg

SEQ ID NO: 6267 - DNA, 19 bp, Homo sapiens
atcgacacttcgaacgcac

SEQ ID NO: 6268 - DNA, 18 bp, Homo sapiens
atcgaccggcgacagcag

SEQ ID NO: 6269 - DNA, 18 bp, Homo sapiens
atcgactgaagagacgcc

SEQ ID NO: 6270 - DNA, 18 bp, Homo sapiens
atcgagaggaagtcgctg

SEQ ID NO: 6271 - DNA, 17 bp, Homo sapiens
atcgagcggcgggagcg

SEQ ID NO: 6272 - DNA, 19 bp, Homo sapiens
atcgagcggcgggagcgag

SEQ ID NO: 6273 - DNA, 20 bp, Homo sapiens
atcgagcggcgggagcgagg

SEQ ID NO: 6274 - DNA, 16 bp, Homo sapiens
atcgaggagtgaggaa

SEQ ID NO: 6275 - DNA, 18 bp, Homo sapiens
atcgaggctgcagcgcgg

SEQ ID NO: 6276 - DNA, 19 bp, Homo sapiens
atcgaggcttccctggttg

SEQ ID NO: 6277 - DNA, 17 bp, Homo sapiens
atcgcagagtggagcgg

SEQ ID NO: 6278 - DNA, 17 bp, Homo sapiens
atcgcagtccggaggtg

SEQ ID NO: 6279 - DNA, 18 bp, Homo sapiens
atcgccgaagcgtcggac

SEQ ID NO: 6280 - DNA, 20 bp, Homo sapiens
atcgccgaagcgtcggacta

SEQ ID NO: 6281 - DNA, 21 bp, Homo sapiens
atcgccgaagcgtcggactac

SEQ ID NO: 6282 - DNA, 19 bp, Homo sapiens
atcgccgccgccaggtgag

SEQ ID NO: 6283 - DNA, 19 bp, Homo sapiens
atcgccgcggccggggctg

SEQ ID NO: 6284 - DNA, 18 bp, Homo sapiens
atcgccggtgtttgcggg

SEQ ID NO: 6285 - DNA, 17 bp, Homo sapiens
atcgcggagagaaggag

SEQ ID NO: 6286 - DNA, 18 bp, Homo sapiens
atcgcggagagaaggagg

SEQ ID NO: 6287 - DNA, 19 bp, Homo sapiens
atcgcggcctagtcccgac

SEQ ID NO: 6288 - DNA, 17 bp, Homo sapiens
atcgcgggtcgcggacg

SEQ ID NO: 6289 - DNA, 18 bp, Homo sapiens
atcgcgggtcgcggacgc

SEQ ID NO: 6290 - DNA, 19 bp, Homo sapiens
atcgcgggtcgcggacgct

SEQ ID NO: 6291 - DNA, 19 bp, Homo sapiens
atcgcgtcgccatgatggg

SEQ ID NO: 6292 - DNA, 17 bp, Homo sapiens
atcgctaccgcccgggc

SEQ ID NO: 6293 - DNA, 19 bp, Homo sapiens
atcggaaacaaaacagcgg

SEQ ID NO: 6294 - DNA, 21 bp, Homo sapiens
atcggaaacaaaacagcggct

SEQ ID NO: 6295 - DNA, 17 bp, Homo sapiens
atcggaaagcaagccta

SEQ ID NO: 6296 - DNA, 19 bp, Homo sapiens
atcggaaagcaagcctacg

SEQ ID NO: 6297 - DNA, 18 bp, Homo sapiens
atcggacccaggctgccc

SEQ ID NO: 6298 - DNA, 19 bp, Homo sapiens
atcggagacgaggacacgg

SEQ ID NO: 6299 - DNA, 22 bp, Homo sapiens
atcggagaggcggagctctcag

SEQ ID NO: 6300 - DNA, 18 bp, Homo sapiens
atcggagggaggttcggg

SEQ ID NO: 6301 - DNA, 19 bp, Homo sapiens
atcggagtcggagacctga

SEQ ID NO: 6302 - DNA, 18 bp, Homo sapiens
atcggccgactagacagc

SEQ ID NO: 6303 - DNA, 17 bp, Homo sapiens
atcgggcagcactgcca

SEQ ID NO: 6304 - DNA, 18 bp, Homo sapiens
atcgggcagcactgccag

SEQ ID NO: 6305 - DNA, 18 bp, Homo sapiens
atcgggcagcatgagcgg

SEQ ID NO: 6306 - DNA, 24 bp, Homo sapiens
atcgggcctgagcagaactaggcg

SEQ ID NO: 6307 - DNA, 18 bp, Homo sapiens
atcgggtaggcggctctt

SEQ ID NO: 6308 - DNA, 17 bp, Homo sapiens
atcgggtaggtaggggc

SEQ ID NO: 6309 - DNA, 20 bp, Homo sapiens
atcgggtaggtaggggctgc

SEQ ID NO: 6310 - DNA, 13 bp, Homo sapiens
atcgggttgcgag

SEQ ID NO: 6311 - DNA, 17 bp, Homo sapiens
atcggtcggaaatggtg

SEQ ID NO: 6312 - DNA, 18 bp, Homo sapiens
atcggtcggaaatggtga

SEQ ID NO: 6313 - DNA, 19 bp, Homo sapiens
atcggtgactgtggagggc

SEQ ID NO: 6314 - DNA, 20 bp, Homo sapiens
atcggtgactgtggagggcg

SEQ ID NO: 6315 - DNA, 18 bp, Homo sapiens
atcggttcccatcccagt

SEQ ID NO: 6316 - DNA, 18 bp, Homo sapiens
atcgtagcggcgacacga

SEQ ID NO: 6317 - DNA, 18 bp, Homo sapiens
atcgtagctcggaaatgg

SEQ ID NO: 6318 - DNA, 19 bp, Homo sapiens
atcgtgcgcccctgtcctc

SEQ ID NO: 6319 - DNA, 17 bp, Homo sapiens
atcgtgcggagcaagca

SEQ ID NO: 6320 - DNA, 18 bp, Homo sapiens
atcgtgtggaatcgcggg

SEQ ID NO: 6321 - DNA, 18 bp, Homo sapiens
atctacgaggtgagtccc

SEQ ID NO: 6322 - DNA, 17 bp, Homo sapiens
gcgggagaacgataatg

SEQ ID NO: 6323 - DNA, 18 bp, Homo sapiens
gcgggagaacgataatgc

SEQ ID NO: 6324 - DNA, 20 bp, Homo sapiens
gcgggagacagcgcagtttg

SEQ ID NO: 6325 - DNA, 18 bp, Homo sapiens
gcgggagagaaatcgctt

SEQ ID NO: 6326 - DNA, 17 bp, Homo sapiens
gcgggagagtgagagaa

SEQ ID NO: 6327 - DNA, 17 bp, Homo sapiens
gcgggagcacgatggcg

SEQ ID NO: 6328 - DNA, 20 bp, Homo sapiens
gcgggagcagcagaggtcta

SEQ ID NO: 6329 - DNA, 18 bp, Homo sapiens
gcgggagccatgcggcga

SEQ ID NO: 6330 - DNA, 19 bp, Homo sapiens
gcgggagcgatctgggcaa

SEQ ID NO: 6331 - DNA, 17 bp, Homo sapiens
gcgggagcggaggaccc

SEQ ID NO: 6332 - DNA, 19 bp, Homo sapiens
gcgggagcgggcgaggatg

SEQ ID NO: 6333 - DNA, 23 bp, Homo sapiens
gcgggagctgaggcgggagcgga

SEQ ID NO: 6334 - DNA, 18 bp, Homo sapiens
gcgggaggatggagcaag

SEQ ID NO: 6335 - DNA, 18 bp, Homo sapiens
gcgggagggcgggtaggc

SEQ ID NO: 6336 - DNA, 17 bp, Homo sapiens
gcgggagtaagaggaaa

SEQ ID NO: 6337 - DNA, 19 bp, Homo sapiens
gcgggatggaggtggatgc

SEQ ID NO: 6338 - DNA, 17 bp, Homo sapiens
gcgggcaaagatggcgg

SEQ ID NO: 6339 - DNA, 19 bp, Homo sapiens
gcgggcaagatggcggcgc

SEQ ID NO: 6340 - DNA, 18 bp, Homo sapiens
gcgggcaaggacggcggg

SEQ ID NO: 6341 - DNA, 21 bp, Homo sapiens
gcgggcaaggcgggcggagcg

SEQ ID NO: 6342 - DNA, 17 bp, Homo sapiens
gcgggcaaggtcagctg

SEQ ID NO: 6343 - DNA, 18 bp, Homo sapiens
gcgggcagcttgccccgc

SEQ ID NO: 6344 - DNA, 16 bp, Homo sapiens
gcgggcaggtcggagc

SEQ ID NO: 6345 - DNA, 17 bp, Homo sapiens
gcgggcagtagccgctg

SEQ ID NO: 6346 - DNA, 19 bp, Homo sapiens
gcgggcagtagccgctgag

SEQ ID NO: 6347 - DNA, 17 bp, Homo sapiens
gcgggccctcggggaca

SEQ ID NO: 6348 - DNA, 19 bp, Homo sapiens
gcgggccgacggccatttt

SEQ ID NO: 6349 - DNA, 17 bp, Homo sapiens
gcgggccgactgtgtag

SEQ ID NO: 6350 - DNA, 21 bp, Homo sapiens
gcgggccgactgtgtagtccg

SEQ ID NO: 6351 - DNA, 22 bp, Homo sapiens
gcgggccgagcagagccgggcg

SEQ ID NO: 6352 - DNA, 18 bp, Homo sapiens
gcgggccgaggagattgg

SEQ ID NO: 6353 - DNA, 21 bp, Homo sapiens
gcgggccgggacctgccaggc

SEQ ID NO: 6354 - DNA, 18 bp, Homo sapiens
gcgggccggggtcagctg

SEQ ID NO: 6355 - DNA, 22 bp, Homo sapiens
gcgggcctctaggagtgaagga

SEQ ID NO: 6356 - DNA, 22 bp, Homo sapiens
gcgggcctggagccgggatccg

SEQ ID NO: 6357 - DNA, 17 bp, Homo sapiens
gcgggcctttgtgaccc

SEQ ID NO: 6358 - DNA, 18 bp, Homo sapiens
gcgggcctttgtgacccc

SEQ ID NO: 6359 - DNA, 24 bp, Homo sapiens
gcgggcctttgtgaccccaggctg

SEQ ID NO: 6360 - DNA, 18 bp, Homo sapiens
gcgggcgagacaacaacg

SEQ ID NO: 6361 - DNA, 17 bp, Homo sapiens
gcgggcgagaggacgcc

SEQ ID NO: 6362 - DNA, 18 bp, Homo sapiens
gcgggcgagcggagcctg

SEQ ID NO: 6363 - DNA, 18 bp, Homo sapiens
gcgggcgaggacagcggc

SEQ ID NO: 6364 - DNA, 18 bp, Homo sapiens
gcgggcgaggatgggcac

SEQ ID NO: 6365 - DNA, 19 bp, Homo sapiens
gcgggcgaggtcaagatgg

SEQ ID NO: 6366 - DNA, 19 bp, Homo sapiens
gcgggcgccgagtgtcggg

SEQ ID NO: 6367 - DNA, 20 bp, Homo sapiens
gcgggcgcttgggccgccat

SEQ ID NO: 6368 - DNA, 18 bp, Homo sapiens
gcgggcggcaggagacta

SEQ ID NO: 6369 - DNA, 18 bp, Homo sapiens
gcgggcggcaggcaacgg

SEQ ID NO: 6370 - DNA, 17 bp, Homo sapiens
gcgggcggcccccctcc

SEQ ID NO: 6371 - DNA, 18 bp, Homo sapiens
gcgggcggcgaggcaaga

SEQ ID NO: 6372 - DNA, 17 bp, Homo sapiens
gcgggcgggagggcgga

SEQ ID NO: 6373 - DNA, 24 bp, Homo sapiens
gcgggcgggcgggaggactcgact

SEQ ID NO: 6374 - DNA, 18 bp, Homo sapiens
gcgggcgggctgagtgag

SEQ ID NO: 6375 - DNA, 17 bp, Homo sapiens
gcgggcggggaccccct

SEQ ID NO: 6376 - DNA, 18 bp, Homo sapiens
gcgggcggggacggagct

SEQ ID NO: 6377 - DNA, 19 bp, Homo sapiens
gcgggcggggagcaacggc

SEQ ID NO: 6378 - DNA, 16 bp, Homo sapiens
gcgggcgtctgttcta

SEQ ID NO: 6379 - DNA, 17 bp, Homo sapiens
atctaggggctgctggg

SEQ ID NO: 6380 - DNA, 17 bp, Homo sapiens
atctatcagcaggctcc

SEQ ID NO: 6381 - DNA, 18 bp, Homo sapiens
atctccagcccaagatga

SEQ ID NO: 6382 - DNA, 18 bp, Homo sapiens
atctcccccgacccaagc

SEQ ID NO: 6383 - DNA, 19 bp, Homo sapiens
atctcgaaccagtggagcg

SEQ ID NO: 6384 - DNA, 17 bp, Homo sapiens
atctcgcggccgttcag

SEQ ID NO: 6385 - DNA, 16 bp, Homo sapiens
atctcgggcagagcgc

SEQ ID NO: 6386 - DNA, 18 bp, Homo sapiens
atctcgggtcttctgacg

SEQ ID NO: 6387 - DNA, 18 bp, Homo sapiens
atctctagactgggacgg

SEQ ID NO: 6388 - DNA, 18 bp, Homo sapiens
atctgaacgccaggagac

SEQ ID NO: 6389 - DNA, 18 bp, Homo sapiens
atctgaagccggccgcag

SEQ ID NO: 6390 - DNA, 21 bp, Homo sapiens
atctgactggcggtttcccgg

SEQ ID NO: 6391 - DNA, 18 bp, Homo sapiens
atctgcagaggatcaccc

SEQ ID NO: 6392 - DNA, 22 bp, Homo sapiens
atctgccgcggccgcctttgcc

SEQ ID NO: 6393 - DNA, 18 bp, Homo sapiens
atctgcggccgtttgcag

SEQ ID NO: 6394 - DNA, 18 bp, Homo sapiens
atctgcggtgggtgtctg

SEQ ID NO: 6395 - DNA, 18 bp, Homo sapiens
atctggacccagaaggga

SEQ ID NO: 6396 - DNA, 19 bp, Homo sapiens
atctggaggacggagagga

SEQ ID NO: 6397 - DNA, 17 bp, Homo sapiens
atctggagggaccaccg

SEQ ID NO: 6398 - DNA, 17 bp, Homo sapiens
atctgtctgaggagcgg

SEQ ID NO: 6399 - DNA, 18 bp, Homo sapiens
atctgtctgaggagcggt

SEQ ID NO: 6400 - DNA, 17 bp, Homo sapiens
atcttacgggcggggcc

SEQ ID NO: 6401 - DNA, 18 bp, Homo sapiens
atcttcccagcacagacg

SEQ ID NO: 6402 - DNA, 18 bp, Homo sapiens
atcttgcttgtgcccccg

SEQ ID NO: 6403 - DNA, 18 bp, Homo sapiens
atcttggcgaagggggga

SEQ ID NO: 6404 - DNA, 18 bp, Homo sapiens
atcttggcgctaaagcgg

SEQ ID NO: 6405 - DNA, 18 bp, Homo sapiens
atcttgttgccggaagtg

SEQ ID NO: 6406 - DNA, 16 bp, Homo sapiens
atcttgtttgtttgag

SEQ ID NO: 6407 - DNA, 18 bp, Homo sapiens
atcttgtttgtttgagtg

SEQ ID NO: 6408 - DNA, 18 bp, Homo sapiens
atgaacgcagcggcggac

SEQ ID NO: 6409 - DNA, 16 bp, Homo sapiens
atgaacgggcggaagc

SEQ ID NO: 6410 - DNA, 18 bp, Homo sapiens
atgaagctaggagagcga

SEQ ID NO: 6411 - DNA, 18 bp, Homo sapiens
atgaaggctagtaaatgg

SEQ ID NO: 6412 - DNA, 19 bp, Homo sapiens
atgacacggcgcccgcggc

SEQ ID NO: 6413 - DNA, 18 bp, Homo sapiens
atgactatggagacccaa

SEQ ID NO: 6414 - DNA, 18 bp, Homo sapiens
atgactggacggtgagtg

SEQ ID NO: 6415 - DNA, 24 bp, Homo sapiens
atgactttgttctgtctcctgcag

SEQ ID NO: 6416 - DNA, 18 bp, Homo sapiens
atgagacttgaaagaaga

SEQ ID NO: 6417 - DNA, 16 bp, Homo sapiens
atgagcggtaaggatg

SEQ ID NO: 6418 - DNA, 19 bp, Homo sapiens
atgcaaaatctggagagcg

SEQ ID NO: 6419 - DNA, 22 bp, Homo sapiens
atgcaacgccggaatcgcggaa

SEQ ID NO: 6420 - DNA, 18 bp, Homo sapiens
atgcacaaggcggggctg

SEQ ID NO: 6421 - DNA, 19 bp, Homo sapiens
atgcacaaggcggggctgc

SEQ ID NO: 6422 - DNA, 22 bp, Homo sapiens
atgcacaaggcggggctgctag

SEQ ID NO: 6423 - DNA, 17 bp, Homo sapiens
atgcacagctgggagcg

SEQ ID NO: 6424 - DNA, 18 bp, Homo sapiens
atgcacagctgggagcgc

SEQ ID NO: 6425 - DNA, 19 bp, Homo sapiens
atgcacagctgggagcgcc

SEQ ID NO: 6426 - DNA, 24 bp, Homo sapiens
atgcacagctgggagcgcctggca

SEQ ID NO: 6427 - DNA, 18 bp, Homo sapiens
atgcactggggaaagcgg

SEQ ID NO: 6428 - DNA, 24 bp, Homo sapiens
atgcagaggaggcccagctgctga

SEQ ID NO: 6429 - DNA, 19 bp, Homo sapiens
atgcagagggcagtaagat

SEQ ID NO: 6430 - DNA, 20 bp, Homo sapiens
atgcagagggcagtaagata

SEQ ID NO: 6431 - DNA, 18 bp, Homo sapiens
atgcagcactggaaggag

SEQ ID NO: 6432 - DNA, 19 bp, Homo sapiens
atgcaggacgcggagaacg

SEQ ID NO: 6433 - DNA, 18 bp, Homo sapiens
atgcaggtgagagttgcg

SEQ ID NO: 6434 - DNA, 16 bp, Homo sapiens
atgccccggaagcgga

SEQ ID NO: 6435 - DNA, 22 bp, Homo sapiens
atgcccctgccgccctgacgcc

SEQ ID NO: 6436 - DNA, 17 bp, Homo sapiens
gcgggcgtctgttctag

SEQ ID NO: 6437 - DNA, 18 bp, Homo sapiens
gcgggcgtgcggagcggg

SEQ ID NO: 6438 - DNA, 19 bp, Homo sapiens
gcgggcgtggacgagccgg

SEQ ID NO: 6439 - DNA, 16 bp, Homo sapiens
gcgggctccgcagcgc

SEQ ID NO: 6440 - DNA, 19 bp, Homo sapiens
gcgggctgagcggcgagtt

SEQ ID NO: 6441 - DNA, 20 bp, Homo sapiens
gcgggctgaggaggctgccg

SEQ ID NO: 6442 - DNA, 16 bp, Homo sapiens
gcgggctgaggcggcc

SEQ ID NO: 6443 - DNA, 20 bp, Homo sapiens
gcgggctggccctcggctgg

SEQ ID NO: 6444 - DNA, 19 bp, Homo sapiens
gcgggcttcccgccccgcc

SEQ ID NO: 6445 - DNA, 18 bp, Homo sapiens
gcgggcttcggaggcgtg

SEQ ID NO: 6446 - DNA, 17 bp, Homo sapiens
gcgggcttgggagccgg

SEQ ID NO: 6447 - DNA, 17 bp, Homo sapiens
gcggggaaaacaaaagg

SEQ ID NO: 6448 - DNA, 18 bp, Homo sapiens
gcggggaaccccaaacgc

SEQ ID NO: 6449 - DNA, 16 bp, Homo sapiens
gcggggaagactggtg

SEQ ID NO: 6450 - DNA, 19 bp, Homo sapiens
gcggggaagactggtgtgg

SEQ ID NO: 6451 - DNA, 17 bp, Homo sapiens
gcggggaagatggagta

SEQ ID NO: 6452 - DNA, 18 bp, Homo sapiens
gcggggaaggaagcggaa

SEQ ID NO: 6453 - DNA, 21 bp, Homo sapiens
gcggggacgcgcgcccgccgc

SEQ ID NO: 6454 - DNA, 20 bp, Homo sapiens
gcggggactaaggcggggcg

SEQ ID NO: 6455 - DNA, 19 bp, Homo sapiens
gcggggagggacgagaggg

SEQ ID NO: 6456 - DNA, 24 bp, Homo sapiens
gcggggagttgtgtccaccttgcc

SEQ ID NO: 6457 - DNA, 18 bp, Homo sapiens
gcggggcacggtaactag

SEQ ID NO: 6458 - DNA, 21 bp, Homo sapiens
gcggggcccgaggttccccgc

SEQ ID NO: 6459 - DNA, 20 bp, Homo sapiens
gcggggcgagccgaaggtgg

SEQ ID NO: 6460 - DNA, 17 bp, Homo sapiens
gcggggcgcaccagcga

SEQ ID NO: 6461 - DNA, 17 bp, Homo sapiens
gcggggcgcgtgctcag

SEQ ID NO: 6462 - DNA, 16 bp, Homo sapiens
gcggggcggagtccgg

SEQ ID NO: 6463 - DNA, 21 bp, Homo sapiens
gcggggctgctggcggctctg

SEQ ID NO: 6464 - DNA, 22 bp, Homo sapiens
gcgggggaagcagcgtgagcag

SEQ ID NO: 6465 - DNA, 19 bp, Homo sapiens
gcgggggacacggcggccg

SEQ ID NO: 6466 - DNA, 17 bp, Homo sapiens
gcgggggagcgccggac

SEQ ID NO: 6467 - DNA, 17 bp, Homo sapiens
gcgggggatgcgggtcg

SEQ ID NO: 6468 - DNA, 18 bp, Homo sapiens
gcgggggatgtgggcggt

SEQ ID NO: 6469 - DNA, 17 bp, Homo sapiens
gcgggggcggcgtgtca

SEQ ID NO: 6470 - DNA, 22 bp, Homo sapiens
gcgggggtgatgccgcgcggtc

SEQ ID NO: 6471 - DNA, 20 bp, Homo sapiens
gcggggtacgcatagccggg

SEQ ID NO: 6472 - DNA, 18 bp, Homo sapiens
gcggggtagtcggcgcga

SEQ ID NO: 6473 - DNA, 18 bp, Homo sapiens
gcggggtatggcgcgctg

SEQ ID NO: 6474 - DNA, 16 bp, Homo sapiens
gcggggtccggacagc

SEQ ID NO: 6475 - DNA, 20 bp, Homo sapiens
gcggggtctgtcctgggacg

SEQ ID NO: 6476 - DNA, 18 bp, Homo sapiens
gcggggtggacaagtggc

SEQ ID NO: 6477 - DNA, 19 bp, Homo sapiens
gcggggtggacaagtggcg

SEQ ID NO: 6478 - DNA, 21 bp, Homo sapiens
gcggggtggacaagtggcgtg

SEQ ID NO: 6479 - DNA, 20 bp, Homo sapiens
gcggggttggtgaggttccg

SEQ ID NO: 6480 - DNA, 18 bp, Homo sapiens
gcgggtaaacagacatgg

SEQ ID NO: 6481 - DNA, 22 bp, Homo sapiens
gcgggtaaacagacatggccgg

SEQ ID NO: 6482 - DNA, 17 bp, Homo sapiens
gcgggtacatggcgggc

SEQ ID NO: 6483 - DNA, 22 bp, Homo sapiens
gcgggtccccgagtgagcacgc

SEQ ID NO: 6484 - DNA, 20 bp, Homo sapiens
gcgggtcctgtgaaggcgag

SEQ ID NO: 6485 - DNA, 18 bp, Homo sapiens
gcgggtcggaacggcgct

SEQ ID NO: 6486 - DNA, 19 bp, Homo sapiens
gcgggtctgagggactggc

SEQ ID NO: 6487 - DNA, 21 bp, Homo sapiens
gcgggtctggctgctgggggc

SEQ ID NO: 6488 - DNA, 18 bp, Homo sapiens
gcgggtgaagggaggttg

SEQ ID NO: 6489 - DNA, 19 bp, Homo sapiens
gcgggtgaggcgctgggta

SEQ ID NO: 6490 - DNA, 18 bp, Homo sapiens
gcgggtgatgaagtcggc

SEQ ID NO: 6491 - DNA, 21 bp, Homo sapiens
gcgggtggatgaacgcggccc

SEQ ID NO: 6492 - DNA, 18 bp, Homo sapiens
gcgggtggcacccgtcgg

SEQ ID NO: 6493 - DNA, 18 bp, Homo sapiens
atgccgcggcggcggcga

SEQ ID NO: 6494 - DNA, 18 bp, Homo sapiens
atgccggcgccgcggctc

SEQ ID NO: 6495 - DNA, 17 bp, Homo sapiens
atgccgtgggtctgacg

SEQ ID NO: 6496 - DNA, 19 bp, Homo sapiens
atgccgtgggtctgacggc

SEQ ID NO: 6497 - DNA, 18 bp, Homo sapiens
atgcctaccccaagactt

SEQ ID NO: 6498 - DNA, 16 bp, Homo sapiens
atgcctgagccagcga

SEQ ID NO: 6499 - DNA, 18 bp, Homo sapiens
atgccttggctgtagtta

SEQ ID NO: 6500 - DNA, 17 bp, Homo sapiens
atgccttgggcacttgg

SEQ ID NO: 6501 - DNA, 18 bp, Homo sapiens
atgcgaaggtaggatgag

SEQ ID NO: 6502 - DNA, 18 bp, Homo sapiens
atgcgaccccaagagcct

SEQ ID NO: 6503 - DNA, 19 bp, Homo sapiens
atgcgccgccgcctctccg

SEQ ID NO: 6504 - DNA, 20 bp, Homo sapiens
atgcgcgctcgtggggtgcg

SEQ ID NO: 6505 - DNA, 17 bp, Homo sapiens
atgcgcggtgcccggtg

SEQ ID NO: 6506 - DNA, 19 bp, Homo sapiens
atgcggaaggtaagggctg

SEQ ID NO: 6507 - DNA, 18 bp, Homo sapiens
atgcggacagggcagcgg

SEQ ID NO: 6508 - DNA, 20 bp, Homo sapiens
atgcggggtgagtgcgcgtc

SEQ ID NO: 6509 - DNA, 18 bp, Homo sapiens
atgcggtcccgggttctg

SEQ ID NO: 6510 - DNA, 19 bp, Homo sapiens
atgcggtcccgggttctgt

SEQ ID NO: 6511 - DNA, 18 bp, Homo sapiens
atgcgtgctacgtcactg

SEQ ID NO: 6512 - DNA, 17 bp, Homo sapiens
atgctcagcgaggcccg

SEQ ID NO: 6513 - DNA, 18 bp, Homo sapiens
atgctcgcggcgatgggc

SEQ ID NO: 6514 - DNA, 19 bp, Homo sapiens
atgctgctcgggggacccc

SEQ ID NO: 6515 - DNA, 19 bp, Homo sapiens
atgctggggctgtaaggcg

SEQ ID NO: 6516 - DNA, 19 bp, Homo sapiens
atgctgggtacgctgcgcg

SEQ ID NO: 6517 - DNA, 18 bp, Homo sapiens
atgctgtggagcggctgc

SEQ ID NO: 6518 - DNA, 17 bp, Homo sapiens
atgcttctgggtcgcgg

SEQ ID NO: 6519 - DNA, 19 bp, Homo sapiens
atgcttctgggtcgcggtg

SEQ ID NO: 6520 - DNA, 21 bp, Homo sapiens
atgcttctgggtcgcggtgtg

SEQ ID NO: 6521 - DNA, 16 bp, Homo sapiens
atggaactggcggacg

SEQ ID NO: 6522 - DNA, 17 bp, Homo sapiens
atggaagaagttaggtg

SEQ ID NO: 6523 - DNA, 18 bp, Homo sapiens
atggaagtggaggaaatc

SEQ ID NO: 6524 - DNA, 19 bp, Homo sapiens
atggacagattgcccggcc

SEQ ID NO: 6525 - DNA, 18 bp, Homo sapiens
atggacgagacgagccca

SEQ ID NO: 6526 - DNA, 19 bp, Homo sapiens
atggacgaggacgtgctaa

SEQ ID NO: 6527 - DNA, 18 bp, Homo sapiens
atggacgcgctggagtcg

SEQ ID NO: 6528 - DNA, 18 bp, Homo sapiens
atggacgctctcgaggac

SEQ ID NO: 6529 - DNA, 18 bp, Homo sapiens
atggacgggtgagtcgca

SEQ ID NO: 6530 - DNA, 19 bp, Homo sapiens
atggacgggtgagtcgcac

SEQ ID NO: 6531 - DNA, 17 bp, Homo sapiens
atggactagccggggcc

SEQ ID NO: 6532 - DNA, 18 bp, Homo sapiens
atggactgctacacggcg

SEQ ID NO: 6533 - DNA, 18 bp, Homo sapiens
atggacttcctccggcta

SEQ ID NO: 6534 - DNA, 19 bp, Homo sapiens
atggagactgtggcacagt

SEQ ID NO: 6535 - DNA, 19 bp, Homo sapiens
atggagcgggcaaggtcag

SEQ ID NO: 6536 - DNA, 18 bp, Homo sapiens
atggagcggtggctccct

SEQ ID NO: 6537 - DNA, 18 bp, Homo sapiens
atggaggacgccgccgcg

SEQ ID NO: 6538 - DNA, 20 bp, Homo sapiens
atggaggagtcggaacccga

SEQ ID NO: 6539 - DNA, 18 bp, Homo sapiens
atggagggcctggcagtg

SEQ ID NO: 6540 - DNA, 19 bp, Homo sapiens
atggagggcctggcagtgc

SEQ ID NO: 6541 - DNA, 17 bp, Homo sapiens
atggagggtcaacgctg

SEQ ID NO: 6542 - DNA, 18 bp, Homo sapiens
atggaggtagggcgggtg

SEQ ID NO: 6543 - DNA, 16 bp, Homo sapiens
atggatgcagagcgtg

SEQ ID NO: 6544 - DNA, 21 bp, Homo sapiens
atggcagcctccagaaagcca

SEQ ID NO: 6545 - DNA, 18 bp, Homo sapiens
atggcagcgctgtgagca

SEQ ID NO: 6546 - DNA, 19 bp, Homo sapiens
atggccacggacgagctgg

SEQ ID NO: 6547 - DNA, 19 bp, Homo sapiens
atggcccatttctccagcg

SEQ ID NO: 6548 - DNA, 18 bp, Homo sapiens
atggccgaagtcggcgag

SEQ ID NO: 6549 - DNA, 18 bp, Homo sapiens
atggccgcgcttgcaccg

SEQ ID NO: 6550 - DNA, 18 bp, Homo sapiens
gcgggtggcggtcggctc

SEQ ID NO: 6551 - DNA, 18 bp, Homo sapiens
gcgggtggctggcggttc

SEQ ID NO: 6552 - DNA, 18 bp, Homo sapiens
gcgggtgtcgctgggctg

SEQ ID NO: 6553 - DNA, 17 bp, Homo sapiens
gcgggttctcgcgcgga

SEQ ID NO: 6554 - DNA, 18 bp, Homo sapiens
gcgggttgtcataacggt

SEQ ID NO: 6555 - DNA, 17 bp, Homo sapiens
gcgggtttcggttggag

SEQ ID NO: 6556 - DNA, 21 bp, Homo sapiens
gcgggtttggagaccccgctg

SEQ ID NO: 6557 - DNA, 17 bp, Homo sapiens
gcggtagcagtggcaac

SEQ ID NO: 6558 - DNA, 21 bp, Homo sapiens
gcggtaggaagccggagacag

SEQ ID NO: 6559 - DNA, 18 bp, Homo sapiens
gcggtaggtggtggaggg

SEQ ID NO: 6560 - DNA, 19 bp, Homo sapiens
gcggtaggtggtggagggc

SEQ ID NO: 6561 - DNA, 18 bp, Homo sapiens
gcggtagtgacacaggca

SEQ ID NO: 6562 - DNA, 18 bp, Homo sapiens
gcggtcatggcggagcgc

SEQ ID NO: 6563 - DNA, 24 bp, Homo sapiens
gcggtccagtcgtagcccggccgc

SEQ ID NO: 6564 - DNA, 19 bp, Homo sapiens
gcggtcccacggcgcctgg

SEQ ID NO: 6565 - DNA, 18 bp, Homo sapiens
gcggtcgagcagaacgtg

SEQ ID NO: 6566 - DNA, 21 bp, Homo sapiens
gcggtcgctacctgcggccga

SEQ ID NO: 6567 - DNA, 18 bp, Homo sapiens
gcggtcggaagcggagca

SEQ ID NO: 6568 - DNA, 16 bp, Homo sapiens
gcggtcggggaataag

SEQ ID NO: 6569 - DNA, 19 bp, Homo sapiens
gcggtctccgtttgtttga

SEQ ID NO: 6570 - DNA, 18 bp, Homo sapiens
gcggtctgtagtgaaggt

SEQ ID NO: 6571 - DNA, 19 bp, Homo sapiens
gcggtctgtagtgaaggtc

SEQ ID NO: 6572 - DNA, 18 bp, Homo sapiens
gcggtgaccgttggcgcc

SEQ ID NO: 6573 - DNA, 18 bp, Homo sapiens
gcggtgagggtagcggcg

SEQ ID NO: 6574 - DNA, 18 bp, Homo sapiens
gcggtgcaagcggctctg

SEQ ID NO: 6575 - DNA, 18 bp, Homo sapiens
gcggtgcaggccgagctg

SEQ ID NO: 6576 - DNA, 18 bp, Homo sapiens
gcggtgcccgccgaaggg

SEQ ID NO: 6577 - DNA, 18 bp, Homo sapiens
gcggtgcgagggctgctg

SEQ ID NO: 6578 - DNA, 22 bp, Homo sapiens
gcggtgctcggcgtacagcaga

SEQ ID NO: 6579 - DNA, 17 bp, Homo sapiens
gcggtggagctagcagg

SEQ ID NO: 6580 - DNA, 18 bp, Homo sapiens
gcggtggatcactcggct

SEQ ID NO: 6581 - DNA, 24 bp, Homo sapiens
gcggtggccatgactgcggccgtg

SEQ ID NO: 6582 - DNA, 18 bp, Homo sapiens
gcggtggcggtggcggct

SEQ ID NO: 6583 - DNA, 23 bp, Homo sapiens
gcggtggctgcggcgacggcaga

SEQ ID NO: 6584 - DNA, 18 bp, Homo sapiens
gcggtgggcaggcagcgc

SEQ ID NO: 6585 - DNA, 21 bp, Homo sapiens
gcggtgggcgaggagcagctg

SEQ ID NO: 6586 - DNA, 18 bp, Homo sapiens
gcggtgtctccggctcca

SEQ ID NO: 6587 - DNA, 21 bp, Homo sapiens
gcggtgtctcggcgcctctgc

SEQ ID NO: 6588 - DNA, 18 bp, Homo sapiens
gcggtgtctgcggcagcg

SEQ ID NO: 6589 - DNA, 20 bp, Homo sapiens
gcggtgtggagacggaaggc

SEQ ID NO: 6590 - DNA, 19 bp, Homo sapiens
gcggttactggcttgcggt

SEQ ID NO: 6591 - DNA, 18 bp, Homo sapiens
gcggttattcggcggccc

SEQ ID NO: 6592 - DNA, 18 bp, Homo sapiens
gcggttccgttaggtctg

SEQ ID NO: 6593 - DNA, 17 bp, Homo sapiens
gcggttcgggcgaagag

SEQ ID NO: 6594 - DNA, 18 bp, Homo sapiens
gcggttgcaggagtaaga

SEQ ID NO: 6595 - DNA, 18 bp, Homo sapiens
gcggttgctgcagccttc

SEQ ID NO: 6596 - DNA, 17 bp, Homo sapiens
gcggttggcttgagcgg

SEQ ID NO: 6597 - DNA, 19 bp, Homo sapiens
gcggttgggccgaggcagg

SEQ ID NO: 6598 - DNA, 17 bp, Homo sapiens
gcggtttggtcgttcgt

SEQ ID NO: 6599 - DNA, 18 bp, Homo sapiens
gcgtaacgagagactgct

SEQ ID NO: 6600 - DNA, 20 bp, Homo sapiens
gcgtaacgagagactgcttg

SEQ ID NO: 6601 - DNA, 17 bp, Homo sapiens
gcgtacgaagcagactg

SEQ ID NO: 6602 - DNA, 18 bp, Homo sapiens
gcgtagacgcggtggcag

SEQ ID NO: 6603 - DNA, 18 bp, Homo sapiens
gcgtagaggccggaccga

SEQ ID NO: 6604 - DNA, 22 bp, Homo sapiens
gcgtagtctcggaggcggcgcc

SEQ ID NO: 6605 - DNA, 20 bp, Homo sapiens
gcgtagttgctggctgctcg

SEQ ID NO: 6606 - DNA, 17 bp, Homo sapiens
gcgtcacttcctcccgg

SEQ ID NO: 6607 - DNA, 17 bp, Homo sapiens
atggccgctgccaaccc

SEQ ID NO: 6608 - DNA, 18 bp, Homo sapiens
atggccgctgccaacccg

SEQ ID NO: 6609 - DNA, 19 bp, Homo sapiens
atggccggcctgtcggacc

SEQ ID NO: 6610 - DNA, 18 bp, Homo sapiens
atggcctcggagaagccg

SEQ ID NO: 6611 - DNA, 18 bp, Homo sapiens
atggcgaagacgtacgat

SEQ ID NO: 6612 - DNA, 18 bp, Homo sapiens
atggcgaggagcccgccc

SEQ ID NO: 6613 - DNA, 21 bp, Homo sapiens
atggcgcagctgggaaagctg

SEQ ID NO: 6614 - DNA, 21 bp, Homo sapiens
atggcgctgtgcgaggccgcg

SEQ ID NO: 6615 - DNA, 22 bp, Homo sapiens
atggcgctgtggcgcggctccg

SEQ ID NO: 6616 - DNA, 17 bp, Homo sapiens
atggcgcttgtcccctg

SEQ ID NO: 6617 - DNA, 20 bp, Homo sapiens
atggcggaacgcaggagaca

SEQ ID NO: 6618 - DNA, 19 bp, Homo sapiens
atggcggaagcggagtgag

SEQ ID NO: 6619 - DNA, 20 bp, Homo sapiens
atggcggaagcggagtgagt

SEQ ID NO: 6620 - DNA, 19 bp, Homo sapiens
atggcggaaggagaagatg

SEQ ID NO: 6621 - DNA, 18 bp, Homo sapiens
atggcggacattcaggtg

SEQ ID NO: 6622 - DNA, 20 bp, Homo sapiens
atggcggaccgagacagcgg

SEQ ID NO: 6623 - DNA, 17 bp, Homo sapiens
atggcggacgagaagga

SEQ ID NO: 6624 - DNA, 17 bp, Homo sapiens
atggcggacgaggcggc

SEQ ID NO: 6625 - DNA, 18 bp, Homo sapiens
atggcggagaacagcggt

SEQ ID NO: 6626 - DNA, 21 bp, Homo sapiens
atggcggagcaagagtgagtg

SEQ ID NO: 6627 - DNA, 18 bp, Homo sapiens
atggcggaggaagaaggt

SEQ ID NO: 6628 - DNA, 19 bp, Homo sapiens
atggcggaggagccgcagt

SEQ ID NO: 6629 - DNA, 20 bp, Homo sapiens
atggcggatgacaaggtgag

SEQ ID NO: 6630 - DNA, 17 bp, Homo sapiens
atggcggcagaagcagc

SEQ ID NO: 6631 - DNA, 21 bp, Homo sapiens
atggcggcgcccgcggagtcg

SEQ ID NO: 6632 - DNA, 17 bp, Homo sapiens
atggcggcgctgaagga

SEQ ID NO: 6633 - DNA, 19 bp, Homo sapiens
atggcggcggaggaggagg

SEQ ID NO: 6634 - DNA, 18 bp, Homo sapiens
atggcggcggccagagct

SEQ ID NO: 6635 - DNA, 19 bp, Homo sapiens
atggcggcgtctcggactg

SEQ ID NO: 6636 - DNA, 16 bp, Homo sapiens
atggcggcgtgtggac

SEQ ID NO: 6637 - DNA, 18 bp, Homo sapiens
atggcggctgcgacgcgc

SEQ ID NO: 6638 - DNA, 19 bp, Homo sapiens
atggcggttggaggaacgg

SEQ ID NO: 6639 - DNA, 18 bp, Homo sapiens
atggcgtggagacacctg

SEQ ID NO: 6640 - DNA, 20 bp, Homo sapiens
atggcgttctggtgtcagcg

SEQ ID NO: 6641 - DNA, 18 bp, Homo sapiens
atggctacagagagccct

SEQ ID NO: 6642 - DNA, 18 bp, Homo sapiens
atggctcgtctgtagtgc

SEQ ID NO: 6643 - DNA, 24 bp, Homo sapiens
atggctgcccccacggctgagggc

SEQ ID NO: 6644 - DNA, 18 bp, Homo sapiens
atggctggtaagcaggcc

SEQ ID NO: 6645 - DNA, 23 bp, Homo sapiens
atggcttcccttccgttttcgcg

SEQ ID NO: 6646 - DNA, 18 bp, Homo sapiens
atgggaagtgaagcccca

SEQ ID NO: 6647 - DNA, 16 bp, Homo sapiens
atgggacggagggggg

SEQ ID NO: 6648 - DNA, 18 bp, Homo sapiens
atgggactagctggcgtg

SEQ ID NO: 6649 - DNA, 24 bp, Homo sapiens
atgggccgcaacaagaagaagaag

SEQ ID NO: 6650 - DNA, 18 bp, Homo sapiens
atgggctcggaaatctag

SEQ ID NO: 6651 - DNA, 16 bp, Homo sapiens
atgggctgagagcccc

SEQ ID NO: 6652 - DNA, 21 bp, Homo sapiens
atgggctgcaagggagacgcg

SEQ ID NO: 6653 - DNA, 19 bp, Homo sapiens
atggggaaggattgagaag

SEQ ID NO: 6654 - DNA, 22 bp, Homo sapiens
atggggatgtgggcatcgctgg

SEQ ID NO: 6655 - DNA, 18 bp, Homo sapiens
atggggcataaaaccact

SEQ ID NO: 6656 - DNA, 19 bp, Homo sapiens
atggggccgggcggccgtg

SEQ ID NO: 6657 - DNA, 21 bp, Homo sapiens
atgggggcggggaaaagtccg

SEQ ID NO: 6658 - DNA, 18 bp, Homo sapiens
atgggggtggcggggcgg

SEQ ID NO: 6659 - DNA, 18 bp, Homo sapiens
atggggtagctggagatt

SEQ ID NO: 6660 - DNA, 19 bp, Homo sapiens
atggggttgactggaggcg

SEQ ID NO: 6661 - DNA, 23 bp, Homo sapiens
atggggttgactggaggcggagg

SEQ ID NO: 6662 - DNA, 16 bp, Homo sapiens
atgggtgtcgggtccg

SEQ ID NO: 6663 - DNA, 21 bp, Homo sapiens
atgggttggtagcagacaggg

SEQ ID NO: 6664 - DNA, 18 bp, Homo sapiens
gcgtcccgcccgctcccc

SEQ ID NO: 6665 - DNA, 18 bp, Homo sapiens
gcgtcccggggcgggacc

SEQ ID NO: 6666 - DNA, 18 bp, Homo sapiens
gcgtccgaggcaacaaga

SEQ ID NO: 6667 - DNA, 22 bp, Homo sapiens
gcgtccgcagcgggcggctgct

SEQ ID NO: 6668 - DNA, 18 bp, Homo sapiens
gcgtccgggagcgccccc

SEQ ID NO: 6669 - DNA, 22 bp, Homo sapiens
gcgtcctcgtggaaggttcgtg

SEQ ID NO: 6670 - DNA, 18 bp, Homo sapiens
gcgtccttccggctccgt

SEQ ID NO: 6671 - DNA, 21 bp, Homo sapiens
gcgtcgcattgccgtttttgc

SEQ ID NO: 6672 - DNA, 18 bp, Homo sapiens
gcgtcgcggaagcgggtc

SEQ ID NO: 6673 - DNA, 19 bp, Homo sapiens
gcgtcgcgtcgctcctgcg

SEQ ID NO: 6674 - DNA, 19 bp, Homo sapiens
gcgtcgggatatcgggtgg

SEQ ID NO: 6675 - DNA, 20 bp, Homo sapiens
gcgtgaagcgcggacctttc

SEQ ID NO: 6676 - DNA, 17 bp, Homo sapiens
gcgtgacgtcgggagga

SEQ ID NO: 6677 - DNA, 16 bp, Homo sapiens
gcgtgagacggagccg

SEQ ID NO: 6678 - DNA, 18 bp, Homo sapiens
gcgtgagccgaacgggcc

SEQ ID NO: 6679 - DNA, 17 bp, Homo sapiens
gcgtgagtaaggaccca

SEQ ID NO: 6680 - DNA, 23 bp, Homo sapiens
gcgtgcacagccaggctgcgaag

SEQ ID NO: 6681 - DNA, 19 bp, Homo sapiens
gcgtgctccctctcgccgc

SEQ ID NO: 6682 - DNA, 18 bp, Homo sapiens
gcgtggacctgggacggg

SEQ ID NO: 6683 - DNA, 16 bp, Homo sapiens
gcgtggacggttggga

SEQ ID NO: 6684 - DNA, 18 bp, Homo sapiens
gcgtggactgaaagttgc

SEQ ID NO: 6685 - DNA, 16 bp, Homo sapiens
gcgtggaggtcgacga

SEQ ID NO: 6686 - DNA, 20 bp, Homo sapiens
gcgtggattccgagcgttgg

SEQ ID NO: 6687 - DNA, 16 bp, Homo sapiens
gcgtgggaggaagatg

SEQ ID NO: 6688 - DNA, 18 bp, Homo sapiens
gcgtgggatagtaaaaga

SEQ ID NO: 6689 - DNA, 17 bp, Homo sapiens
gcgtgggctgggattgc

SEQ ID NO: 6690 - DNA, 18 bp, Homo sapiens
gcgtggggcggacgcggc

SEQ ID NO: 6691 - DNA, 18 bp, Homo sapiens
gcgtgggtgaggaaggtc

SEQ ID NO: 6692 - DNA, 23 bp, Homo sapiens
gcgtgtagcgcataactggacgg

SEQ ID NO: 6693 - DNA, 16 bp, Homo sapiens
gcgtgtagcgggcgca

SEQ ID NO: 6694 - DNA, 22 bp, Homo sapiens
gcgtgtgagcagtactgcggcc

SEQ ID NO: 6695 - DNA, 21 bp, Homo sapiens
gcgttaggaggctcgggtcgt

SEQ ID NO: 6696 - DNA, 16 bp, Homo sapiens
gcgttgcggtcaagat

SEQ ID NO: 6697 - DNA, 18 bp, Homo sapiens
gcgttgtgagcggactgc

SEQ ID NO: 6698 - DNA, 14 bp, Homo sapiens
gcgttgtgggcgtt

SEQ ID NO: 6699 - DNA, 17 bp, Homo sapiens
gcgtttctgcgtctgcc

SEQ ID NO: 6700 - DNA, 18 bp, Homo sapiens
gcgtttctgcgtctgccg

SEQ ID NO: 6701 - DNA, 18 bp, Homo sapiens
gcgtttgggcttaataca

SEQ ID NO: 6702 - DNA, 18 bp, Homo sapiens
gctaaactgtgtggggcg

SEQ ID NO: 6703 - DNA, 16 bp, Homo sapiens
gctaaagccgctgctg

SEQ ID NO: 6704 - DNA, 18 bp, Homo sapiens
gctaaccgcgtcggggag

SEQ ID NO: 6705 - DNA, 20 bp, Homo sapiens
gctaacgggagtcccaggtg

SEQ ID NO: 6706 - DNA, 22 bp, Homo sapiens
gctaacggtcgcgcggccgtcg

SEQ ID NO: 6707 - DNA, 23 bp, Homo sapiens
gctaacggtcgcgcggccgtcgc

SEQ ID NO: 6708 - DNA, 21 bp, Homo sapiens
gctaacgtagtccctcagtgc

SEQ ID NO: 6709 - DNA, 18 bp, Homo sapiens
gctaagatggcgacggag

SEQ ID NO: 6710 - DNA, 17 bp, Homo sapiens
gctaagctagcgccgtc

SEQ ID NO: 6711 - DNA, 21 bp, Homo sapiens
gctaagctcctctctggaaag

SEQ ID NO: 6712 - DNA, 19 bp, Homo sapiens
gctaagtccatcttccggc

SEQ ID NO: 6713 - DNA, 19 bp, Homo sapiens
gctaatgagcgagttgcca

SEQ ID NO: 6714 - DNA, 18 bp, Homo sapiens
gctaatggcgtcggcgag

SEQ ID NO: 6715 - DNA, 18 bp, Homo sapiens
gctacagcagcgagaacg

SEQ ID NO: 6716 - DNA, 17 bp, Homo sapiens
gctaccgtgactaagat

SEQ ID NO: 6717 - DNA, 18 bp, Homo sapiens
gctacctagtgggtcttg

SEQ ID NO: 6718 - DNA, 19 bp, Homo sapiens
gctacgcgacgcggaggtt

SEQ ID NO: 6719 - DNA, 19 bp, Homo sapiens
gctacggagtgcatcggac

SEQ ID NO: 6720 - DNA, 21 bp, Homo sapiens
gctacggcgctgaagggccgg

SEQ ID NO: 6721 - DNA, 20 bp, Homo sapiens
atggtgagagctgcggaatc

SEQ ID NO: 6722 - DNA, 18 bp, Homo sapiens
atggtgaggcactagggg

SEQ ID NO: 6723 - DNA, 18 bp, Homo sapiens
atggtgagtgaggacgca

SEQ ID NO: 6724 - DNA, 15 bp, Homo sapiens
atggtgccgccacga

SEQ ID NO: 6725 - DNA, 19 bp, Homo sapiens
atggtggaggaggagaaca

SEQ ID NO: 6726 - DNA, 20 bp, Homo sapiens
atggtggaggaggagaacat

SEQ ID NO: 6727 - DNA, 20 bp, Homo sapiens
atggtgtagtgcaggcaggg

SEQ ID NO: 6728 - DNA, 18 bp, Homo sapiens
atggtgtcggtgagcgcg

SEQ ID NO: 6729 - DNA, 18 bp, Homo sapiens
atggttcgtctgcctctg

SEQ ID NO: 6730 - DNA, 20 bp, Homo sapiens
atggttgtcgtatccttctg

SEQ ID NO: 6731 - DNA, 18 bp, Homo sapiens
atggttttcctcgcgttc

SEQ ID NO: 6732 - DNA, 17 bp, Homo sapiens
atgtcagacacggacag

SEQ ID NO: 6733 - DNA, 18 bp, Homo sapiens
atgtcgacggcggcggtt

SEQ ID NO: 6734 - DNA, 18 bp, Homo sapiens
atgtcggagcgaaaagta

SEQ ID NO: 6735 - DNA, 18 bp, Homo sapiens
atgtcggtgtgagcgagc

SEQ ID NO: 6736 - DNA, 21 bp, Homo sapiens
atgtcgtttgctgagagcggg

SEQ ID NO: 6737 - DNA, 18 bp, Homo sapiens
atgtctgggcgcggcaaa

SEQ ID NO: 6738 - DNA, 21 bp, Homo sapiens
atgtctggtggctccgcggat

SEQ ID NO: 6739 - DNA, 21 bp, Homo sapiens
atgtgaattgcaggacacatt

SEQ ID NO: 6740 - DNA, 16 bp, Homo sapiens
atgtgaccctctggca

SEQ ID NO: 6741 - DNA, 16 bp, Homo sapiens
atgtgacgcaggggcc

SEQ ID NO: 6742 - DNA, 23 bp, Homo sapiens
atgtgaggcaggcgagccggacg

SEQ ID NO: 6743 - DNA, 16 bp, Homo sapiens
atgtgaggcggagcgg

SEQ ID NO: 6744 - DNA, 20 bp, Homo sapiens
atgtgcagctgcagcgggcg

SEQ ID NO: 6745 - DNA, 19 bp, Homo sapiens
atgtggcgtcaggaagcga

SEQ ID NO: 6746 - DNA, 17 bp, Homo sapiens
atgtgggtcttgaagag

SEQ ID NO: 6747 - DNA, 17 bp, Homo sapiens
atgtggtctccgacgga

SEQ ID NO: 6748 - DNA, 20 bp, Homo sapiens
atgtgtgctggtgaatgtga

SEQ ID NO: 6749 - DNA, 20 bp, Homo sapiens
atgttagagattacaatttg

SEQ ID NO: 6750 - DNA, 18 bp, Homo sapiens
atgttcactcctgggcac

SEQ ID NO: 6751 - DNA, 20 bp, Homo sapiens
atgttgaatttggaaattgg

SEQ ID NO: 6752 - DNA, 18 bp, Homo sapiens
atgttgggtctgaagcgg

SEQ ID NO: 6753 - DNA, 21 bp, Homo sapiens
atgtttggcgggaagttggct

SEQ ID NO: 6754 - DNA, 18 bp, Homo sapiens
attaaaaccaggcttgta

SEQ ID NO: 6755 - DNA, 18 bp, Homo sapiens
attaaacggttgcaggcg

SEQ ID NO: 6756 - DNA, 20 bp, Homo sapiens
attaaagctgttaacgtgta

SEQ ID NO: 6757 - DNA, 18 bp, Homo sapiens
attacgagattggcttgg

SEQ ID NO: 6758 - DNA, 18 bp, Homo sapiens
attactattgtgcggctg

SEQ ID NO: 6759 - DNA, 19 bp, Homo sapiens
attagaccacgggttgcag

SEQ ID NO: 6760 - DNA, 18 bp, Homo sapiens
attagagtttcttccctg

SEQ ID NO: 6761 - DNA, 18 bp, Homo sapiens
attagtccgagtggagag

SEQ ID NO: 6762 - DNA, 19 bp, Homo sapiens
attagtccgagtggagaga

SEQ ID NO: 6763 - DNA, 18 bp, Homo sapiens
attagttggtttcggagc

SEQ ID NO: 6764 - DNA, 19 bp, Homo sapiens
attcagccagcacactcct

SEQ ID NO: 6765 - DNA, 17 bp, Homo sapiens
attcaggtgcggactcg

SEQ ID NO: 6766 - DNA, 20 bp, Homo sapiens
attcaggtgcggactcgggg

SEQ ID NO: 6767 - DNA, 17 bp, Homo sapiens
attcagttgtcgaggag

SEQ ID NO: 6768 - DNA, 18 bp, Homo sapiens
attcagttgtttgcgggc

SEQ ID NO: 6769 - DNA, 21 bp, Homo sapiens
attcataagactcagagctac

SEQ ID NO: 6770 - DNA, 19 bp, Homo sapiens
attcatccattttgaagag

SEQ ID NO: 6771 - DNA, 16 bp, Homo sapiens
attcattgccgtggcc

SEQ ID NO: 6772 - DNA, 19 bp, Homo sapiens
attcccagcttgctccgta

SEQ ID NO: 6773 - DNA, 18 bp, Homo sapiens
attcccggactgctaggc

SEQ ID NO: 6774 - DNA, 18 bp, Homo sapiens
attcccgtccctccttcc

SEQ ID NO: 6775 - DNA, 19 bp, Homo sapiens
attccctgtcctcggatca

SEQ ID NO: 6776 - DNA, 18 bp, Homo sapiens
attccgctgtaacagctt

SEQ ID NO: 6777 - DNA, 22 bp, Homo sapiens
attcctgaggactaggaaggtg

SEQ ID NO: 6778 - DNA, 20 bp, Homo sapiens
gctacggcggcgcagaaatg

SEQ ID NO: 6779 - DNA, 18 bp, Homo sapiens
gctagaacgagcggccct

SEQ ID NO: 6780 - DNA, 18 bp, Homo sapiens
gctagaccgcggggtagt

SEQ ID NO: 6781 - DNA, 21 bp, Homo sapiens
gctagaccgcggggtagtcgg

SEQ ID NO: 6782 - DNA, 18 bp, Homo sapiens
gctagcggacggtccggc

SEQ ID NO: 6783 - DNA, 18 bp, Homo sapiens
gctagcggcttcgcggtt

SEQ ID NO: 6784 - DNA, 18 bp, Homo sapiens
gctagctcgctcggtgcg

SEQ ID NO: 6785 - DNA, 19 bp, Homo sapiens
gctaggtttcgtttcctcg

SEQ ID NO: 6786 - DNA, 18 bp, Homo sapiens
gctagtgagtgcgcgaac

SEQ ID NO: 6787 - DNA, 18 bp, Homo sapiens
gctagtgtgtcaactcag

SEQ ID NO: 6788 - DNA, 20 bp, Homo sapiens
gctagtgttgggtgttccgc

SEQ ID NO: 6789 - DNA, 19 bp, Homo sapiens
gctatagaagtcgggcgga

SEQ ID NO: 6790 - DNA, 18 bp, Homo sapiens
gctatgaggcgggacgtg

SEQ ID NO: 6791 - DNA, 16 bp, Homo sapiens
gctatggtggtggtgg

SEQ ID NO: 6792 - DNA, 18 bp, Homo sapiens
gctcaactgcaaggacgc

SEQ ID NO: 6793 - DNA, 23 bp, Homo sapiens
gctcacgcaagcatggtaggact

SEQ ID NO: 6794 - DNA, 17 bp, Homo sapiens
gctcacgcgtgggagac

SEQ ID NO: 6795 - DNA, 18 bp, Homo sapiens
gctcacggagcggctggc

SEQ ID NO: 6796 - DNA, 21 bp, Homo sapiens
gctcacgtaggcgtcatgagg

SEQ ID NO: 6797 - DNA, 21 bp, Homo sapiens
gctcactggagtttggttctc

SEQ ID NO: 6798 - DNA, 19 bp, Homo sapiens
gctcactggggaagactgc

SEQ ID NO: 6799 - DNA, 19 bp, Homo sapiens
gctcagcagcaaacagctc

SEQ ID NO: 6800 - DNA, 18 bp, Homo sapiens
gctcaggaacggacagga

SEQ ID NO: 6801 - DNA, 16 bp, Homo sapiens
gctcaggcccgtggcg

SEQ ID NO: 6802 - DNA, 19 bp, Homo sapiens
gctcagggcggctgcgcag

SEQ ID NO: 6803 - DNA, 16 bp, Homo sapiens
gctccaatttcctgta

SEQ ID NO: 6804 - DNA, 18 bp, Homo sapiens
gctccagagacacgagcg

SEQ ID NO: 6805 - DNA, 20 bp, Homo sapiens
gctccagcgacctcagccac

SEQ ID NO: 6806 - DNA, 20 bp, Homo sapiens
gctccagctgtacggactcg

SEQ ID NO: 6807 - DNA, 18 bp, Homo sapiens
gctccaggcagcctggag

SEQ ID NO: 6808 - DNA, 18 bp, Homo sapiens
gctccaggccgtcggggg

SEQ ID NO: 6809 - DNA, 19 bp, Homo sapiens
gctccaggtccgggactgc

SEQ ID NO: 6810 - DNA, 22 bp, Homo sapiens
gctcccccctccccccgagcgc

SEQ ID NO: 6811 - DNA, 16 bp, Homo sapiens
gctccccggcggggac

SEQ ID NO: 6812 - DNA, 22 bp, Homo sapiens
gctcccggacaagggcaacgag

SEQ ID NO: 6813 - DNA, 23 bp, Homo sapiens
gctccctctgctgcccagtcgcg

SEQ ID NO: 6814 - DNA, 18 bp, Homo sapiens
gctccgagagggagtcct

SEQ ID NO: 6815 - DNA, 19 bp, Homo sapiens
gctccgcattgcagactgc

SEQ ID NO: 6816 - DNA, 17 bp, Homo sapiens
gctccgccaggcaggag

SEQ ID NO: 6817 - DNA, 18 bp, Homo sapiens
gctccgccaggcaggaga

SEQ ID NO: 6818 - DNA, 18 bp, Homo sapiens
gctccgcgcggctgctgc

SEQ ID NO: 6819 - DNA, 17 bp, Homo sapiens
gctccgctgctgctgtc

SEQ ID NO: 6820 - DNA, 18 bp, Homo sapiens
gctccgctgctgctgtca

SEQ ID NO: 6821 - DNA, 18 bp, Homo sapiens
gctccggaacggtaaggg

SEQ ID NO: 6822 - DNA, 18 bp, Homo sapiens
gctccggcggacctctgg

SEQ ID NO: 6823 - DNA, 20 bp, Homo sapiens
gctccggcggcggcggtcgg

SEQ ID NO: 6824 - DNA, 22 bp, Homo sapiens
gctccgggctctgggtggcggc

SEQ ID NO: 6825 - DNA, 18 bp, Homo sapiens
gctccgtcgctgacgcgt

SEQ ID NO: 6826 - DNA, 18 bp, Homo sapiens
gctcctgcggcggggtag

SEQ ID NO: 6827 - DNA, 21 bp, Homo sapiens
gctcctggcgagcgactgagt

SEQ ID NO: 6828 - DNA, 24 bp, Homo sapiens
gctcctggcgagcgactgagtcgt

SEQ ID NO: 6829 - DNA, 18 bp, Homo sapiens
gctcctgttgcaatggcg

SEQ ID NO: 6830 - DNA, 18 bp, Homo sapiens
gctcgagacagcggcgac

SEQ ID NO: 6831 - DNA, 24 bp, Homo sapiens
gctcgcagcgggaggtcgcgaagc

SEQ ID NO: 6832 - DNA, 20 bp, Homo sapiens
gctcgcatgagcacctcata

SEQ ID NO: 6833 - DNA, 19 bp, Homo sapiens
gctcgcgctgcaggcaggg

SEQ ID NO: 6834 - DNA, 21 bp, Homo sapiens
gctcgcgtggacaccgcaagc

SEQ ID NO: 6835 - DNA, 17 bp, Homo sapiens
attcctgaggaggactg

SEQ ID NO: 6836 - DNA, 17 bp, Homo sapiens
attcctgcagaggatca

SEQ ID NO: 6837 - DNA, 17 bp, Homo sapiens
attcgattggaaggctg

SEQ ID NO: 6838 - DNA, 20 bp, Homo sapiens
attcgcgcagaccaggaagc

SEQ ID NO: 6839 - DNA, 22 bp, Homo sapiens
attcgcggtatcaggaatttca

SEQ ID NO: 6840 - DNA, 19 bp, Homo sapiens
attcgctttcatttcctca

SEQ ID NO: 6841 - DNA, 19 bp, Homo sapiens
attcggagtgaggagtggg

SEQ ID NO: 6842 - DNA, 17 bp, Homo sapiens
attcggcagagggcgct

SEQ ID NO: 6843 - DNA, 20 bp, Homo sapiens
attcgggaaaggcagacagg

SEQ ID NO: 6844 - DNA, 22 bp, Homo sapiens
attcgggaaaggcagacaggta

SEQ ID NO: 6845 - DNA, 17 bp, Homo sapiens
attcggggctgaggggc

SEQ ID NO: 6846 - DNA, 16 bp, Homo sapiens
attcgtaggacagccc

SEQ ID NO: 6847 - DNA, 17 bp, Homo sapiens
attcgtaggacagcccc

SEQ ID NO: 6848 - DNA, 17 bp, Homo sapiens
attctccggcggctgca

SEQ ID NO: 6849 - DNA, 19 bp, Homo sapiens
attctctttcccatcttgc

SEQ ID NO: 6850 - DNA, 18 bp, Homo sapiens
attctgagccgagcccgg

SEQ ID NO: 6851 - DNA, 17 bp, Homo sapiens
attctggcgccgctgac

SEQ ID NO: 6852 - DNA, 18 bp, Homo sapiens
attcttcaggtaccgctg

SEQ ID NO: 6853 - DNA, 17 bp, Homo sapiens
attgaatttcaaacaca

SEQ ID NO: 6854 - DNA, 22 bp, Homo sapiens
attgacgccatgagcgcgctgc

SEQ ID NO: 6855 - DNA, 20 bp, Homo sapiens
attgagacctgtggaggagg

SEQ ID NO: 6856 - DNA, 18 bp, Homo sapiens
attgaggaaactgtggct

SEQ ID NO: 6857 - DNA, 21 bp, Homo sapiens
attgaggaaactgtggctgga

SEQ ID NO: 6858 - DNA, 19 bp, Homo sapiens
attgaggcgccgccatttt

SEQ ID NO: 6859 - DNA, 18 bp, Homo sapiens
attgaggcgggtgaaggg

SEQ ID NO: 6860 - DNA, 17 bp, Homo sapiens
attgccctttagtccca

SEQ ID NO: 6861 - DNA, 17 bp, Homo sapiens
attgccgctcccagtcc

SEQ ID NO: 6862 - DNA, 24 bp, Homo sapiens
attgcgcgccggcctcaagatggc

SEQ ID NO: 6863 - DNA, 19 bp, Homo sapiens
attgctctggagccagcag

SEQ ID NO: 6864 - DNA, 18 bp, Homo sapiens
attgctgcagcagggaca

SEQ ID NO: 6865 - DNA, 18 bp, Homo sapiens
attgcttgcgctggggtg

SEQ ID NO: 6866 - DNA, 18 bp, Homo sapiens
attggcacagacccggaa

SEQ ID NO: 6867 - DNA, 19 bp, Homo sapiens
attggcggaaaggaaaata

SEQ ID NO: 6868 - DNA, 18 bp, Homo sapiens
attgggcggccgggagtg

SEQ ID NO: 6869 - DNA, 16 bp, Homo sapiens
attgggctgtcagtca

SEQ ID NO: 6870 - DNA, 16 bp, Homo sapiens
attggtcggcgtagct

SEQ ID NO: 6871 - DNA, 21 bp, Homo sapiens
attgtcgatattttgttggca

SEQ ID NO: 6872 - DNA, 18 bp, Homo sapiens
attgtgaggcggttgtag

SEQ ID NO: 6873 - DNA, 21 bp, Homo sapiens
attgtgcatgccgtgggtctg

SEQ ID NO: 6874 - DNA, 15 bp, Homo sapiens
attgtgctcgtcccc

SEQ ID NO: 6875 - DNA, 22 bp, Homo sapiens
attgtggacccgagaagcagag

SEQ ID NO: 6876 - DNA, 21 bp, Homo sapiens
attgtgggaaggaggcggcag

SEQ ID NO: 6877 - DNA, 18 bp, Homo sapiens
attgttacgcacctgaca

SEQ ID NO: 6878 - DNA, 22 bp, Homo sapiens
attgttaggcgtggagagggag

SEQ ID NO: 6879 - DNA, 16 bp, Homo sapiens
attgttcggctgggct

SEQ ID NO: 6880 - DNA, 20 bp, Homo sapiens
atttaaactgcggcggttta

SEQ ID NO: 6881 - DNA, 19 bp, Homo sapiens
atttaagtaaaacaagatg

SEQ ID NO: 6882 - DNA, 18 bp, Homo sapiens
atttacattttaagtgta

SEQ ID NO: 6883 - DNA, 18 bp, Homo sapiens
atttacccgacccgacgc

SEQ ID NO: 6884 - DNA, 19 bp, Homo sapiens
atttacccgacccgacgcc

SEQ ID NO: 6885 - DNA, 24 bp, Homo sapiens
atttccaggcactctcattcatag

SEQ ID NO: 6886 - DNA, 17 bp, Homo sapiens
atttccggtgggggcgc

SEQ ID NO: 6887 - DNA, 17 bp, Homo sapiens
atttccttaccaatcgg

SEQ ID NO: 6888 - DNA, 19 bp, Homo sapiens
atttcgcacgacgcagcgg

SEQ ID NO: 6889 - DNA, 16 bp, Homo sapiens
atttcgcgtccgcttc

SEQ ID NO: 6890 - DNA, 18 bp, Homo sapiens
atttcggttctcacagac

SEQ ID NO: 6891 - DNA, 18 bp, Homo sapiens
atttcgtaaccagaagcc

SEQ ID NO: 6892 - DNA, 18 bp, Homo sapiens
gctcgctgaaatgtgtgg

SEQ ID NO: 6893 - DNA, 18 bp, Homo sapiens
gctcgctgttcgtccggg

SEQ ID NO: 6894 - DNA, 18 bp, Homo sapiens
gctcggacgagtacggag

SEQ ID NO: 6895 - DNA, 19 bp, Homo sapiens
gctcggagcccggagcgtg

SEQ ID NO: 6896 - DNA, 18 bp, Homo sapiens
gctcggagccggagggag

SEQ ID NO: 6897 - DNA, 18 bp, Homo sapiens
gctcggaggtcgtggcgc

SEQ ID NO: 6898 - DNA, 20 bp, Homo sapiens
gctcggcaaggtaggttggc

SEQ ID NO: 6899 - DNA, 19 bp, Homo sapiens
gctcggcagcagcgcagcg

SEQ ID NO: 6900 - DNA, 24 bp, Homo sapiens
gctcggccacgggtggcgaggctg

SEQ ID NO: 6901 - DNA, 15 bp, Homo sapiens
gctcgggagagcgag

SEQ ID NO: 6902 - DNA, 17 bp, Homo sapiens
gctcgggcagaggggcg

SEQ ID NO: 6903 - DNA, 18 bp, Homo sapiens
gctcgggcgcacacggag

SEQ ID NO: 6904 - DNA, 16 bp, Homo sapiens
gctcgggcggccgtgg

SEQ ID NO: 6905 - DNA, 18 bp, Homo sapiens
gctcggggagtgaaggcc

SEQ ID NO: 6906 - DNA, 22 bp, Homo sapiens
gctcgggggaaaagacgttgcg

SEQ ID NO: 6907 - DNA, 18 bp, Homo sapiens
gctcgggggagcgtgagt

SEQ ID NO: 6908 - DNA, 20 bp, Homo sapiens
gctcgggtaagaatggggct

SEQ ID NO: 6909 - DNA, 18 bp, Homo sapiens
gctcgggtcggcttcggt

SEQ ID NO: 6910 - DNA, 16 bp, Homo sapiens
gctcgggtcgttgtgg

SEQ ID NO: 6911 - DNA, 21 bp, Homo sapiens
gctcggtcggtctcgcgcgcc

SEQ ID NO: 6912 - DNA, 20 bp, Homo sapiens
gctcgtagcgccgggccttc

SEQ ID NO: 6913 - DNA, 18 bp, Homo sapiens
gctcgtcgcgcctgcgca

SEQ ID NO: 6914 - DNA, 21 bp, Homo sapiens
gctcgtcttcgcccgccatgg

SEQ ID NO: 6915 - DNA, 18 bp, Homo sapiens
gctcgtggccatggagtg

SEQ ID NO: 6916 - DNA, 18 bp, Homo sapiens
gctctaagttcccaaggg

SEQ ID NO: 6917 - DNA, 19 bp, Homo sapiens
gctctagcggagtgggatc

SEQ ID NO: 6918 - DNA, 18 bp, Homo sapiens
gctctaggggctggactc

SEQ ID NO: 6919 - DNA, 16 bp, Homo sapiens
gctctcggatgaggag

SEQ ID NO: 6920 - DNA, 14 bp, Homo sapiens
gctctcggcgcgac

SEQ ID NO: 6921 - DNA, 18 bp, Homo sapiens
gctctcggtcgcgcggag

SEQ ID NO: 6922 - DNA, 19 bp, Homo sapiens
gctctctccttgtcagtcg

SEQ ID NO: 6923 - DNA, 16 bp, Homo sapiens
gctctctgtcccgctc

SEQ ID NO: 6924 - DNA, 22 bp, Homo sapiens
gctctgactccaggttgggaca

SEQ ID NO: 6925 - DNA, 21 bp, Homo sapiens
gctctgagcggctgggcgacc

SEQ ID NO: 6926 - DNA, 16 bp, Homo sapiens
gctctgagcgggtgag

SEQ ID NO: 6927 - DNA, 17 bp, Homo sapiens
gctctgctgctttagct

SEQ ID NO: 6928 - DNA, 22 bp, Homo sapiens
gctctgctttccccgcaggata

SEQ ID NO: 6929 - DNA, 18 bp, Homo sapiens
gctctggacgctgaggcc

SEQ ID NO: 6930 - DNA, 18 bp, Homo sapiens
gctctggcgcggggcttc

SEQ ID NO: 6931 - DNA, 17 bp, Homo sapiens
gctctgggcggcgggcg

SEQ ID NO: 6932 - DNA, 17 bp, Homo sapiens
gctctgggtctaggtag

SEQ ID NO: 6933 - DNA, 18 bp, Homo sapiens
gctctgggtggcggcggc

SEQ ID NO: 6934 - DNA, 17 bp, Homo sapiens
gctcttatcggttccca

SEQ ID NO: 6935 - DNA, 18 bp, Homo sapiens
gctcttcagtttgcccga

SEQ ID NO: 6936 - DNA, 18 bp, Homo sapiens
gctcttcccggtcatgga

SEQ ID NO: 6937 - DNA, 22 bp, Homo sapiens
gctcttctcggctcagtctcag

SEQ ID NO: 6938 - DNA, 19 bp, Homo sapiens
gctcttgcgcgtcttgttc

SEQ ID NO: 6939 - DNA, 18 bp, Homo sapiens
gctcttggtggacgggcc

SEQ ID NO: 6940 - DNA, 21 bp, Homo sapiens
gctctttggaagtcgccggtg

SEQ ID NO: 6941 - DNA, 17 bp, Homo sapiens
gctgaaaattgaaatca

SEQ ID NO: 6942 - DNA, 18 bp, Homo sapiens
gctgaaccggtctcttcc

SEQ ID NO: 6943 - DNA, 18 bp, Homo sapiens
gctgaacggatggctgag

SEQ ID NO: 6944 - DNA, 19 bp, Homo sapiens
gctgaagctcgtcagttca

SEQ ID NO: 6945 - DNA, 17 bp, Homo sapiens
gctgaagtcggctaggt

SEQ ID NO: 6946 - DNA, 18 bp, Homo sapiens
gctgaagtcggctaggtt

SEQ ID NO: 6947 - DNA, 18 bp, Homo sapiens
gctgaagtggcggcggct

SEQ ID NO: 6948 - DNA, 18 bp, Homo sapiens
gctgaatggagctggtcg

SEQ ID NO: 6949 - DNA, 24 bp, Homo sapiens
atttctaccggtctctagtagtgc

SEQ ID NO: 6950 - DNA, 16 bp, Homo sapiens
atttctagtcgactgt

SEQ ID NO: 6951 - DNA, 17 bp, Homo sapiens
atttctagtcgactgtt

SEQ ID NO: 6952 - DNA, 17 bp, Homo sapiens
atttgcttttgcggagg

SEQ ID NO: 6953 - DNA, 21 bp, Homo sapiens
atttggaacgaaaggaagtgg

SEQ ID NO: 6954 - DNA, 18 bp, Homo sapiens
atttggatttggagacgg

SEQ ID NO: 6955 - DNA, 19 bp, Homo sapiens
atttggatttggagacgga

SEQ ID NO: 6956 - DNA, 18 bp, Homo sapiens
atttgtccgtctccgact

SEQ ID NO: 6957 - DNA, 18 bp, Homo sapiens
atttgtgcgccggtgcag

SEQ ID NO: 6958 - DNA, 16 bp, Homo sapiens
attttagccgtaatgt

SEQ ID NO: 6959 - DNA, 17 bp, Homo sapiens
attttagccgtaatgtc

SEQ ID NO: 6960 - DNA, 18 bp, Homo sapiens
attttgaggaggtcggag

SEQ ID NO: 6961 - DNA, 18 bp, Homo sapiens
attttgcggggttcgtcg

SEQ ID NO: 6962 - DNA, 20 bp, Homo sapiens
attttgcgttgtctgggctc

SEQ ID NO: 6963 - DNA, 18 bp, Homo sapiens
attttggccccagcggtg

SEQ ID NO: 6964 - DNA, 18 bp, Homo sapiens
attttggtgcgagagaaa

SEQ ID NO: 6965 - DNA, 21 bp, Homo sapiens
attttgtgcagtcgctgggaa

SEQ ID NO: 6966 - DNA, 18 bp, Homo sapiens
caaaaccctgcagaacgg

SEQ ID NO: 6967 - DNA, 17 bp, Homo sapiens
caaaacgggcggtcgag

SEQ ID NO: 6968 - DNA, 17 bp, Homo sapiens
caaaatcacagaatgaa

SEQ ID NO: 6969 - DNA, 20 bp, Homo sapiens
caaaatgctgaactgctctt

SEQ ID NO: 6970 - DNA, 18 bp, Homo sapiens
caaaatggcgaggggctg

SEQ ID NO: 6971 - DNA, 17 bp, Homo sapiens
caaaatggctgcccgag

SEQ ID NO: 6972 - DNA, 16 bp, Homo sapiens
caaacagcacatccgg

SEQ ID NO: 6973 - DNA, 18 bp, Homo sapiens
caaacaggtctgggaggc

SEQ ID NO: 6974 - DNA, 20 bp, Homo sapiens
caaacaggtctgggaggcag

SEQ ID NO: 6975 - DNA, 22 bp, Homo sapiens
caaaccagaattagccggtata

SEQ ID NO: 6976 - DNA, 23 bp, Homo sapiens
caaactctaaaagaaggacgcat

SEQ ID NO: 6977 - DNA, 24 bp, Homo sapiens
caaagaagggctccaagaaggcgg

SEQ ID NO: 6978 - DNA, 19 bp, Homo sapiens
caaagatggcggcagggac

SEQ ID NO: 6979 - DNA, 23 bp, Homo sapiens
caaagatggcggcggcgactgtg

SEQ ID NO: 6980 - DNA, 18 bp, Homo sapiens
caaagatgtcggagcgaa

SEQ ID NO: 6981 - DNA, 19 bp, Homo sapiens
caaagcagcaattaaagtc

SEQ ID NO: 6982 - DNA, 18 bp, Homo sapiens
caaagccagggtgcgcta

SEQ ID NO: 6983 - DNA, 17 bp, Homo sapiens
caaagcgactttcgcta

SEQ ID NO: 6984 - DNA, 18 bp, Homo sapiens
caaagggcggggttagac

SEQ ID NO: 6985 - DNA, 18 bp, Homo sapiens
caaaggtaagcgggccgt

SEQ ID NO: 6986 - DNA, 18 bp, Homo sapiens
caaaggtcagaggtaaag

SEQ ID NO: 6987 - DNA, 18 bp, Homo sapiens
caacaaacggatggtttg

SEQ ID NO: 6988 - DNA, 20 bp, Homo sapiens
caacaaagatggcggcggcg

SEQ ID NO: 6989 - DNA, 22 bp, Homo sapiens
caacacccacaatcagccactg

SEQ ID NO: 6990 - DNA, 20 bp, Homo sapiens
caacagagtgggcatagaca

SEQ ID NO: 6991 - DNA, 19 bp, Homo sapiens
caacaggtttcgggcggcg

SEQ ID NO: 6992 - DNA, 17 bp, Homo sapiens
caacatggcggagctga

SEQ ID NO: 6993 - DNA, 21 bp, Homo sapiens
caacatttacaggaaactggc

SEQ ID NO: 6994 - DNA, 20 bp, Homo sapiens
caaccacatttgtgtttcag

SEQ ID NO: 6995 - DNA, 17 bp, Homo sapiens
caacccggacggaagtg

SEQ ID NO: 6996 - DNA, 19 bp, Homo sapiens
caacccggacggaagtgcc

SEQ ID NO: 6997 - DNA, 18 bp, Homo sapiens
caacccggtaaacggaag

SEQ ID NO: 6998 - DNA, 20 bp, Homo sapiens
caacccggtcacctacccgc

SEQ ID NO: 6999 - DNA, 18 bp, Homo sapiens
caacccttttcttccgca

SEQ ID NO: 7000 - DNA, 18 bp, Homo sapiens
caaccgctaccgggagcg

SEQ ID NO: 7001 - DNA, 21 bp, Homo sapiens
caaccggacggctggagaggg

SEQ ID NO: 7002 - DNA, 20 bp, Homo sapiens
caacggaccggacagagacg

SEQ ID NO: 7003 - DNA, 19 bp, Homo sapiens
caactactcacagctacta

SEQ ID NO: 7004 - DNA, 18 bp, Homo sapiens
caactgcaggtctaattt

SEQ ID NO: 7005 - DNA, 18 bp, Homo sapiens
caactggagtgaggggag

SEQ ID NO: 7006 - DNA, 21 bp, Homo sapiens
gctgacaaggactggggacgg

SEQ ID NO: 7007 - DNA, 24 bp, Homo sapiens
gctgacacgctgtcctctggcgac

SEQ ID NO: 7008 - DNA, 18 bp, Homo sapiens
gctgacagcacgactcag

SEQ ID NO: 7009 - DNA, 18 bp, Homo sapiens
gctgacgaaggcggggtc

SEQ ID NO: 7010 - DNA, 22 bp, Homo sapiens
gctgacgctccgcattgcagac

SEQ ID NO: 7011 - DNA, 19 bp, Homo sapiens
gctgacggaagtggcctcg

SEQ ID NO: 7012 - DNA, 18 bp, Homo sapiens
gctgacggtggaggttcg

SEQ ID NO: 7013 - DNA, 18 bp, Homo sapiens
gctgacgtgtctgggcgg

SEQ ID NO: 7014 - DNA, 19 bp, Homo sapiens
gctgactcaagcggaggcg

SEQ ID NO: 7015 - DNA, 17 bp, Homo sapiens
gctgactcccgtagagg

SEQ ID NO: 7016 - DNA, 19 bp, Homo sapiens
gctgactcgccctgcgccc

SEQ ID NO: 7017 - DNA, 19 bp, Homo sapiens
gctgactcggcggggcgga

SEQ ID NO: 7018 - DNA, 18 bp, Homo sapiens
gctgactggcaggtgctt

SEQ ID NO: 7019 - DNA, 18 bp, Homo sapiens
gctgagacaggtaacctg

SEQ ID NO: 7020 - DNA, 22 bp, Homo sapiens
gctgagacgaggttaggattta

SEQ ID NO: 7021 - DNA, 20 bp, Homo sapiens
gctgagaggcagcgaactca

SEQ ID NO: 7022 - DNA, 17 bp, Homo sapiens
gctgagccaagcgttta

SEQ ID NO: 7023 - DNA, 18 bp, Homo sapiens
gctgagccgcggacacca

SEQ ID NO: 7024 - DNA, 20 bp, Homo sapiens
gctgagccgcggacaccatg

SEQ ID NO: 7025 - DNA, 21 bp, Homo sapiens
gctgagccgggcgatggacga

SEQ ID NO: 7026 - DNA, 18 bp, Homo sapiens
gctgagcgcagaagcggc

SEQ ID NO: 7027 - DNA, 18 bp, Homo sapiens
gctgagcgcgcggggaaa

SEQ ID NO: 7028 - DNA, 17 bp, Homo sapiens
gctgagcggcggaaccc

SEQ ID NO: 7029 - DNA, 18 bp, Homo sapiens
gctgagcgggtgtttggg

SEQ ID NO: 7030 - DNA, 18 bp, Homo sapiens
gctgagctggtaggagga

SEQ ID NO: 7031 - DNA, 17 bp, Homo sapiens
gctgaggaaggctgtag

SEQ ID NO: 7032 - DNA, 19 bp, Homo sapiens
gctgaggactgactggggt

SEQ ID NO: 7033 - DNA, 24 bp, Homo sapiens
gctgaggagagagtcgcgacggtg

SEQ ID NO: 7034 - DNA, 19 bp, Homo sapiens
gctgaggagctggagctgg

SEQ ID NO: 7035 - DNA, 18 bp, Homo sapiens
gctgaggcagcggctgtg

SEQ ID NO: 7036 - DNA, 21 bp, Homo sapiens
gctgaggcggagtaggatgag

SEQ ID NO: 7037 - DNA, 18 bp, Homo sapiens
gctgagggggcggtagcg

SEQ ID NO: 7038 - DNA, 19 bp, Homo sapiens
gctgagggggcggtagcgg

SEQ ID NO: 7039 - DNA, 17 bp, Homo sapiens
gctgaggtagggacgtg

SEQ ID NO: 7040 - DNA, 21 bp, Homo sapiens
gctgagtcggagccagaggcc

SEQ ID NO: 7041 - DNA, 19 bp, Homo sapiens
gctgagtggagcccggctg

SEQ ID NO: 7042 - DNA, 18 bp, Homo sapiens
gctgagtggtttttcgga

SEQ ID NO: 7043 - DNA, 18 bp, Homo sapiens
gctgagtgtctcctgata

SEQ ID NO: 7044 - DNA, 24 bp, Homo sapiens
gctgagttctagagatcgggtcgg

SEQ ID NO: 7045 - DNA, 17 bp, Homo sapiens
gctgatcgcagtccgga

SEQ ID NO: 7046 - DNA, 18 bp, Homo sapiens
gctgatcgcagtccggag

SEQ ID NO: 7047 - DNA, 20 bp, Homo sapiens
gctgatcgcagtccggaggt

SEQ ID NO: 7048 - DNA, 18 bp, Homo sapiens
gctgatcgctcgtgccgg

SEQ ID NO: 7049 - DNA, 17 bp, Homo sapiens
gctgatcggtgaggacg

SEQ ID NO: 7050 - DNA, 17 bp, Homo sapiens
gctgatgtgttattcct

SEQ ID NO: 7051 - DNA, 19 bp, Homo sapiens
gctgattgtgttctagggg

SEQ ID NO: 7052 - DNA, 20 bp, Homo sapiens
gctgcaccgcagcccctttc

SEQ ID NO: 7053 - DNA, 18 bp, Homo sapiens
gctgcactgcgaggccga

SEQ ID NO: 7054 - DNA, 17 bp, Homo sapiens
gctgcagaggattcctg

SEQ ID NO: 7055 - DNA, 18 bp, Homo sapiens
gctgcagcaggcggggca

SEQ ID NO: 7056 - DNA, 19 bp, Homo sapiens
gctgcagcaggcggggcac

SEQ ID NO: 7057 - DNA, 16 bp, Homo sapiens
gctgcagcggctccgg

SEQ ID NO: 7058 - DNA, 18 bp, Homo sapiens
gctgcagctgcaggcgtg

SEQ ID NO: 7059 - DNA, 20 bp, Homo sapiens
gctgcagctggcggcctgcg

SEQ ID NO: 7060 - DNA, 18 bp, Homo sapiens
gctgcaggggtcggggat

SEQ ID NO: 7061 - DNA, 18 bp, Homo sapiens
gctgccaaccctcccgcc

SEQ ID NO: 7062 - DNA, 21 bp, Homo sapiens
gctgccactgccactgccacc

SEQ ID NO: 7063 - DNA, 18 bp, Homo sapiens
caacttaggaccaaattg

SEQ ID NO: 7064 - DNA, 16 bp, Homo sapiens
caacttgcgagccatg

SEQ ID NO: 7065 - DNA, 19 bp, Homo sapiens
caagaataaaagaagaacc

SEQ ID NO: 7066 - DNA, 16 bp, Homo sapiens
caagacgcaggcgcaa

SEQ ID NO: 7067 - DNA, 18 bp, Homo sapiens
caagactgagccggcggc

SEQ ID NO: 7068 - DNA, 19 bp, Homo sapiens
caagactgagccggcggcc

SEQ ID NO: 7069 - DNA, 20 bp, Homo sapiens
caagactgagccggcggccg

SEQ ID NO: 7070 - DNA, 21 bp, Homo sapiens
caagactggagaggaagcgac

SEQ ID NO: 7071 - DNA, 16 bp, Homo sapiens
caagaggcaagaggta

SEQ ID NO: 7072 - DNA, 18 bp, Homo sapiens
caagagtgagcgagcgga

SEQ ID NO: 7073 - DNA, 23 bp, Homo sapiens
caagatccgatctactgagagct

SEQ ID NO: 7074 - DNA, 18 bp, Homo sapiens
caagatcgttctggcagg

SEQ ID NO: 7075 - DNA, 19 bp, Homo sapiens
caagatcgttctggcagga

SEQ ID NO: 7076 - DNA, 18 bp, Homo sapiens
caagatgaatgcaggctc

SEQ ID NO: 7077 - DNA, 20 bp, Homo sapiens
caagatgaatgcaggctcag

SEQ ID NO: 7078 - DNA, 16 bp, Homo sapiens
caagatggcggacaaa

SEQ ID NO: 7079 - DNA, 18 bp, Homo sapiens
caagatggcggcggtttt

SEQ ID NO: 7080 - DNA, 18 bp, Homo sapiens
caagatggcggcgtgtgg

SEQ ID NO: 7081 - DNA, 17 bp, Homo sapiens
caagatggcggctccct

SEQ ID NO: 7082 - DNA, 18 bp, Homo sapiens
caagatggcgtccctgga

SEQ ID NO: 7083 - DNA, 16 bp, Homo sapiens
caagatggcgtcgaag

SEQ ID NO: 7084 - DNA, 18 bp, Homo sapiens
caagatggtgagtgacta

SEQ ID NO: 7085 - DNA, 17 bp, Homo sapiens
caagatgtcgacggcgg

SEQ ID NO: 7086 - DNA, 18 bp, Homo sapiens
caagcaagatggcagctt

SEQ ID NO: 7087 - DNA, 18 bp, Homo sapiens
caagcagctggatctccg

SEQ ID NO: 7088 - DNA, 18 bp, Homo sapiens
caagcatggtaggacttg

SEQ ID NO: 7089 - DNA, 18 bp, Homo sapiens
caagccccaaccggatcc

SEQ ID NO: 7090 - DNA, 18 bp, Homo sapiens
caagcccgcagcaaacac

SEQ ID NO: 7091 - DNA, 17 bp, Homo sapiens
caagctccgagcgtcag

SEQ ID NO: 7092 - DNA, 17 bp, Homo sapiens
caagctgggaacaaacc

SEQ ID NO: 7093 - DNA, 21 bp, Homo sapiens
caaggaaaatggcagctcccg

SEQ ID NO: 7094 - DNA, 18 bp, Homo sapiens
caaggaaatgtcaaatga

SEQ ID NO: 7095 - DNA, 19 bp, Homo sapiens
caaggaagaaggaaggaga

SEQ ID NO: 7096 - DNA, 18 bp, Homo sapiens
caaggacgagccggggcg

SEQ ID NO: 7097 - DNA, 19 bp, Homo sapiens
caaggaggacgcggcgcgc

SEQ ID NO: 7098 - DNA, 18 bp, Homo sapiens
caaggattaaaggaagcg

SEQ ID NO: 7099 - DNA, 23 bp, Homo sapiens
caaggcaagactggcacccagca

SEQ ID NO: 7100 - DNA, 16 bp, Homo sapiens
caaggctctggtgtcc

SEQ ID NO: 7101 - DNA, 23 bp, Homo sapiens
caaggctgagggagcgggacgga

SEQ ID NO: 7102 - DNA, 18 bp, Homo sapiens
caagggccgcagccagca

SEQ ID NO: 7103 - DNA, 18 bp, Homo sapiens
caagggttggtctcgcgc

SEQ ID NO: 7104 - DNA, 17 bp, Homo sapiens
caaggtcccaccttcta

SEQ ID NO: 7105 - DNA, 19 bp, Homo sapiens
caaggtggctgcagctagg

SEQ ID NO: 7106 - DNA, 18 bp, Homo sapiens
caagtagcggacacggaa

SEQ ID NO: 7107 - DNA, 24 bp, Homo sapiens
caagtattgggagagccacagcta

SEQ ID NO: 7108 - DNA, 23 bp, Homo sapiens
caagtccctcccctcgaccggcc

SEQ ID NO: 7109 - DNA, 18 bp, Homo sapiens
caagtgagtgttggcggg

SEQ ID NO: 7110 - DNA, 18 bp, Homo sapiens
caagtgagttgcgaactc

SEQ ID NO: 7111 - DNA, 20 bp, Homo sapiens
caagtgcgctgtgctcgagg

SEQ ID NO: 7112 - DNA, 18 bp, Homo sapiens
caagtggaaaggggcagt

SEQ ID NO: 7113 - DNA, 19 bp, Homo sapiens
caagtttgaatttcgtgga

SEQ ID NO: 7114 - DNA, 18 bp, Homo sapiens
caataccaggcgggaggg

SEQ ID NO: 7115 - DNA, 18 bp, Homo sapiens
caatatccccacaagggc

SEQ ID NO: 7116 - DNA, 19 bp, Homo sapiens
caatatccccacaagggcc

SEQ ID NO: 7117 - DNA, 21 bp, Homo sapiens
caatcccctcgccctacacct

SEQ ID NO: 7118 - DNA, 18 bp, Homo sapiens
caatctccagtctgtctg

SEQ ID NO: 7119 - DNA, 16 bp, Homo sapiens
caatgcctgatccagc

SEQ ID NO: 7120 - DNA, 18 bp, Homo sapiens
gctgccaggctccactga

SEQ ID NO: 7121 - DNA, 23 bp, Homo sapiens
gctgcccagaagaagggaaggcg

SEQ ID NO: 7122 - DNA, 18 bp, Homo sapiens
gctgcccagggaccgatg

SEQ ID NO: 7123 - DNA, 19 bp, Homo sapiens
gctgcccgagggagacggg

SEQ ID NO: 7124 - DNA, 18 bp, Homo sapiens
gctgccgccgccgccaca

SEQ ID NO: 7125 - DNA, 18 bp, Homo sapiens
gctgccggaagggctcgt

SEQ ID NO: 7126 - DNA, 20 bp, Homo sapiens
gctgccggaagtaggcggtg

SEQ ID NO: 7127 - DNA, 21 bp, Homo sapiens
gctgccggaccgtgaggctgt

SEQ ID NO: 7128 - DNA, 21 bp, Homo sapiens
gctgccggacggcgtgggcgg

SEQ ID NO: 7129 - DNA, 18 bp, Homo sapiens
gctgccggagaaagagca

SEQ ID NO: 7130 - DNA, 16 bp, Homo sapiens
gctgccgggaggcgag

SEQ ID NO: 7131 - DNA, 17 bp, Homo sapiens
gctgccgggcggtcctg

SEQ ID NO: 7132 - DNA, 18 bp, Homo sapiens
gctgcctacggaggtggc

SEQ ID NO: 7133 - DNA, 21 bp, Homo sapiens
gctgcctgaaccgagccctgc

SEQ ID NO: 7134 - DNA, 23 bp, Homo sapiens
gctgcctgagcaacgtctccgag

SEQ ID NO: 7135 - DNA, 16 bp, Homo sapiens
gctgcctggctgactt

SEQ ID NO: 7136 - DNA, 20 bp, Homo sapiens
gctgcgaagggaggtgagcg

SEQ ID NO: 7137 - DNA, 19 bp, Homo sapiens
gctgcgaccgttgggtgag

SEQ ID NO: 7138 - DNA, 18 bp, Homo sapiens
gctgcgacttctctaatg

SEQ ID NO: 7139 - DNA, 21 bp, Homo sapiens
gctgcgagaccctagaggcct

SEQ ID NO: 7140 - DNA, 16 bp, Homo sapiens
gctgcgatgaccctgt

SEQ ID NO: 7141 - DNA, 17 bp, Homo sapiens
gctgcgattgaggaaga

SEQ ID NO: 7142 - DNA, 18 bp, Homo sapiens
gctgcgccaggcgcgccg

SEQ ID NO: 7143 - DNA, 18 bp, Homo sapiens
gctgcgcccttcagtatc

SEQ ID NO: 7144 - DNA, 22 bp, Homo sapiens
gctgcgccgtggagctgcggat

SEQ ID NO: 7145 - DNA, 21 bp, Homo sapiens
gctgcgcgcaggccgggaaca

SEQ ID NO: 7146 - DNA, 18 bp, Homo sapiens
gctgcgcgcgggtggcgg

SEQ ID NO: 7147 - DNA, 19 bp, Homo sapiens
gctgcgcggagggctcggc

SEQ ID NO: 7148 - DNA, 18 bp, Homo sapiens
gctgcgcgtctgcgggaa

SEQ ID NO: 7149 - DNA, 17 bp, Homo sapiens
gctgcggagcggacgga

SEQ ID NO: 7150 - DNA, 18 bp, Homo sapiens
gctgcggagcggacggac

SEQ ID NO: 7151 - DNA, 17 bp, Homo sapiens
gctgcggagggtgcgtg

SEQ ID NO: 7152 - DNA, 16 bp, Homo sapiens
gctgcggagtgaacgg

SEQ ID NO: 7153 - DNA, 17 bp, Homo sapiens
gctgcggagtgaacggt

SEQ ID NO: 7154 - DNA, 18 bp, Homo sapiens
gctgcggagtgaacggtg

SEQ ID NO: 7155 - DNA, 20 bp, Homo sapiens
gctgcggagtgaacggtgtg

SEQ ID NO: 7156 - DNA, 21 bp, Homo sapiens
gctgcggagtgaacggtgtgg

SEQ ID NO: 7157 - DNA, 21 bp, Homo sapiens
gctgcggagtgagtgaccaag

SEQ ID NO: 7158 - DNA, 18 bp, Homo sapiens
gctgcggatcaggacccg

SEQ ID NO: 7159 - DNA, 18 bp, Homo sapiens
gctgcggccccgacttca

SEQ ID NO: 7160 - DNA, 17 bp, Homo sapiens
gctgcggccgcaaggtg

SEQ ID NO: 7161 - DNA, 18 bp, Homo sapiens
gctgcggccgcaaggtgc

SEQ ID NO: 7162 - DNA, 18 bp, Homo sapiens
gctgcggccgcgtagagg

SEQ ID NO: 7163 - DNA, 18 bp, Homo sapiens
gctgcggcgcctgggctg

SEQ ID NO: 7164 - DNA, 20 bp, Homo sapiens
gctgcggcgcctgggctgct

SEQ ID NO: 7165 - DNA, 24 bp, Homo sapiens
gctgcggcggcggcgccggctacg

SEQ ID NO: 7166 - DNA, 17 bp, Homo sapiens
gctgcggctgccacgtt

SEQ ID NO: 7167 - DNA, 22 bp, Homo sapiens
gctgcggctgggagcgggaaga

SEQ ID NO: 7168 - DNA, 20 bp, Homo sapiens
gctgcggcttctgaggagta

SEQ ID NO: 7169 - DNA, 17 bp, Homo sapiens
gctgcgggcccgctccg

SEQ ID NO: 7170 - DNA, 18 bp, Homo sapiens
gctgcgggcgccgagtgt

SEQ ID NO: 7171 - DNA, 19 bp, Homo sapiens
gctgcggggccaacgcggc

SEQ ID NO: 7172 - DNA, 18 bp, Homo sapiens
gctgcgggtcgtggacgc

SEQ ID NO: 7173 - DNA, 20 bp, Homo sapiens
gctgcggtaggaacatggcg

SEQ ID NO: 7174 - DNA, 16 bp, Homo sapiens
gctgcgtggggctcgg

SEQ ID NO: 7175 - DNA, 17 bp, Homo sapiens
gctgcgtggggctcggc

SEQ ID NO: 7176 - DNA, 20 bp, Homo sapiens
gctgcgttcggcaggcgctg

SEQ ID NO: 7177 - DNA, 23 bp, Homo sapiens
caatggcgacctttgtgagcgag

SEQ ID NO: 7178 - DNA, 21 bp, Homo sapiens
caatggcggaaggagaagatg

SEQ ID NO: 7179 - DNA, 22 bp, Homo sapiens
caatggcggcgcccgcggagtc

SEQ ID NO: 7180 - DNA, 17 bp, Homo sapiens
caatggggcagcaactg

SEQ ID NO: 7181 - DNA, 20 bp, Homo sapiens
caatgtcggaaatggctgag

SEQ ID NO: 7182 - DNA, 18 bp, Homo sapiens
caattagtgtcgtgcggc

SEQ ID NO: 7183 - DNA, 19 bp, Homo sapiens
caattgtcatacgacttgc

SEQ ID NO: 7184 - DNA, 19 bp, Homo sapiens
caatttaagtaaaacaaga

SEQ ID NO: 7185 - DNA, 18 bp, Homo sapiens
cacaacaaagatggcggc

SEQ ID NO: 7186 - DNA, 21 bp, Homo sapiens
cacaacacccacaatcagcca

SEQ ID NO: 7187 - DNA, 23 bp, Homo sapiens
cacaactctggcagcggacccgg

SEQ ID NO: 7188 - DNA, 23 bp, Homo sapiens
cacaagaagcggatccaggtagc

SEQ ID NO: 7189 - DNA, 20 bp, Homo sapiens
cacaagatggcggctctggc

SEQ ID NO: 7190 - DNA, 22 bp, Homo sapiens
cacaagctgtcggctcggttcg

SEQ ID NO: 7191 - DNA, 18 bp, Homo sapiens
cacaataccaggcgggag

SEQ ID NO: 7192 - DNA, 18 bp, Homo sapiens
cacacacggtgctgctac

SEQ ID NO: 7193 - DNA, 19 bp, Homo sapiens
cacacccttcttaaagcgg

SEQ ID NO: 7194 - DNA, 23 bp, Homo sapiens
cacaccggtcaggcccggcgcgg

SEQ ID NO: 7195 - DNA, 18 bp, Homo sapiens
cacacctacagtggacta

SEQ ID NO: 7196 - DNA, 18 bp, Homo sapiens
cacacctacctgcccggc

SEQ ID NO: 7197 - DNA, 22 bp, Homo sapiens
cacacctcagggaggcctcggt

SEQ ID NO: 7198 - DNA, 18 bp, Homo sapiens
cacacgagaacatgcctg

SEQ ID NO: 7199 - DNA, 18 bp, Homo sapiens
cacacgcctttggctaca

SEQ ID NO: 7200 - DNA, 16 bp, Homo sapiens
cacacggagcagggac

SEQ ID NO: 7201 - DNA, 19 bp, Homo sapiens
cacactgctcagggaagag

SEQ ID NO: 7202 - DNA, 19 bp, Homo sapiens
cacagacgactgggcttgg

SEQ ID NO: 7203 - DNA, 19 bp, Homo sapiens
cacagagagattggtgttt

SEQ ID NO: 7204 - DNA, 17 bp, Homo sapiens
cacagatcaggtactgc

SEQ ID NO: 7205 - DNA, 20 bp, Homo sapiens
cacagcccgtgccaccacac

SEQ ID NO: 7206 - DNA, 17 bp, Homo sapiens
cacagcgagcggagccg

SEQ ID NO: 7207 - DNA, 19 bp, Homo sapiens
cacagctgcagatttgggg

SEQ ID NO: 7208 - DNA, 17 bp, Homo sapiens
cacagctgggagcgcct

SEQ ID NO: 7209 - DNA, 19 bp, Homo sapiens
cacagctgggagcgcctgg

SEQ ID NO: 7210 - DNA, 18 bp, Homo sapiens
cacaggcagggcgagcgc

SEQ ID NO: 7211 - DNA, 18 bp, Homo sapiens
cacaggctgagacgagac

SEQ ID NO: 7212 - DNA, 16 bp, Homo sapiens
cacaggtaactcccat

SEQ ID NO: 7213 - DNA, 20 bp, Homo sapiens
cacagtcgcacgcagccagg

SEQ ID NO: 7214 - DNA, 20 bp, Homo sapiens
cacagtgctgtcagaacggc

SEQ ID NO: 7215 - DNA, 18 bp, Homo sapiens
cacatacacccagccctg

SEQ ID NO: 7216 - DNA, 18 bp, Homo sapiens
cacatatggggctgcgga

SEQ ID NO: 7217 - DNA, 18 bp, Homo sapiens
cacatgcaacatttacag

SEQ ID NO: 7218 - DNA, 18 bp, Homo sapiens
cacatgtttccgcggagc

SEQ ID NO: 7219 - DNA, 17 bp, Homo sapiens
cacattcagcggctgcc

SEQ ID NO: 7220 - DNA, 18 bp, Homo sapiens
cacattgatcatcgacac

SEQ ID NO: 7221 - DNA, 23 bp, Homo sapiens
cacattgatcatcgacacttcga

SEQ ID NO: 7222 - DNA, 18 bp, Homo sapiens
caccaacgccaacaacaa

SEQ ID NO: 7223 - DNA, 21 bp, Homo sapiens
caccaagatcgttctggcagg

SEQ ID NO: 7224 - DNA, 17 bp, Homo sapiens
caccaccaagcgcgtct

SEQ ID NO: 7225 - DNA, 21 bp, Homo sapiens
caccaccgccgagaccgcgtc

SEQ ID NO: 7226 - DNA, 19 bp, Homo sapiens
caccacgctcggagaagga

SEQ ID NO: 7227 - DNA, 16 bp, Homo sapiens
caccagcgtagaagag

SEQ ID NO: 7228 - DNA, 18 bp, Homo sapiens
caccatgaagtccagcgg

SEQ ID NO: 7229 - DNA, 18 bp, Homo sapiens
caccatggacgctgaagg

SEQ ID NO: 7230 - DNA, 18 bp, Homo sapiens
cacccacgcagtgttcta

SEQ ID NO: 7231 - DNA, 18 bp, Homo sapiens
caccccaggacgtcgggt

SEQ ID NO: 7232 - DNA, 17 bp, Homo sapiens
caccccagtgcaacgcc

SEQ ID NO: 7233 - DNA, 21 bp, Homo sapiens
cacccgaggccacgccccaga

SEQ ID NO: 7234 - DNA, 19 bp, Homo sapiens
gctgcgttgaggatctttg

SEQ ID NO: 7235 - DNA, 19 bp, Homo sapiens
gctgcgttggggtgaggcc

SEQ ID NO: 7236 - DNA, 17 bp, Homo sapiens
gctgctaaacccaaccg

SEQ ID NO: 7237 - DNA, 20 bp, Homo sapiens
gctgctcaactgcaaggacg

SEQ ID NO: 7238 - DNA, 21 bp, Homo sapiens
gctgctcaactgcaaggacgc

SEQ ID NO: 7239 - DNA, 20 bp, Homo sapiens
gctgctcagtttccttcagc

SEQ ID NO: 7240 - DNA, 18 bp, Homo sapiens
gctgctctgggggattcg

SEQ ID NO: 7241 - DNA, 18 bp, Homo sapiens
gctgctgatcgcgggatt

SEQ ID NO: 7242 - DNA, 18 bp, Homo sapiens
gctgctgcggttcatagc

SEQ ID NO: 7243 - DNA, 18 bp, Homo sapiens
gctgctgcgtgacagcgg

SEQ ID NO: 7244 - DNA, 18 bp, Homo sapiens
gctgctgctgcagcaaaa

SEQ ID NO: 7245 - DNA, 18 bp, Homo sapiens
gctgctgctgcgggggcg

SEQ ID NO: 7246 - DNA, 20 bp, Homo sapiens
gctgctggagtacgagcgac

SEQ ID NO: 7247 - DNA, 18 bp, Homo sapiens
gctgctggcggctctgca

SEQ ID NO: 7248 - DNA, 18 bp, Homo sapiens
gctgctgggagagtacgt

SEQ ID NO: 7249 - DNA, 21 bp, Homo sapiens
gctgctggggttaggattctg

SEQ ID NO: 7250 - DNA, 17 bp, Homo sapiens
gctgctgtctgcggagg

SEQ ID NO: 7251 - DNA, 18 bp, Homo sapiens
gctgctgtgagagggcgc

SEQ ID NO: 7252 - DNA, 18 bp, Homo sapiens
gctgctgttctgccccgg

SEQ ID NO: 7253 - DNA, 18 bp, Homo sapiens
gctgcttcttggattgac

SEQ ID NO: 7254 - DNA, 18 bp, Homo sapiens
gctggaacgggagtactg

SEQ ID NO: 7255 - DNA, 22 bp, Homo sapiens
gctggaacgggagtactgcgac

SEQ ID NO: 7256 - DNA, 20 bp, Homo sapiens
gctggaactggcaggcaccg

SEQ ID NO: 7257 - DNA, 18 bp, Homo sapiens
gctggaagccggtaggac

SEQ ID NO: 7258 - DNA, 21 bp, Homo sapiens
gctggacaagtggcttgggct

SEQ ID NO: 7259 - DNA, 18 bp, Homo sapiens
gctggaccaggagaccgc

SEQ ID NO: 7260 - DNA, 17 bp, Homo sapiens
gctggaccgaaaccggc

SEQ ID NO: 7261 - DNA, 18 bp, Homo sapiens
gctggaccgaaaccggcg

SEQ ID NO: 7262 - DNA, 18 bp, Homo sapiens
gctggacgagacagtggt

SEQ ID NO: 7263 - DNA, 18 bp, Homo sapiens
gctggacgtggagaagag

SEQ ID NO: 7264 - DNA, 18 bp, Homo sapiens
gctggagacgtgtggagc

SEQ ID NO: 7265 - DNA, 18 bp, Homo sapiens
gctggagagggggcgctg

SEQ ID NO: 7266 - DNA, 17 bp, Homo sapiens
gctggagagtaatgtta

SEQ ID NO: 7267 - DNA, 18 bp, Homo sapiens
gctggagccctcggcccc

SEQ ID NO: 7268 - DNA, 18 bp, Homo sapiens
gctggagcggacacacgg

SEQ ID NO: 7269 - DNA, 18 bp, Homo sapiens
gctggaggctgcgttcgg

SEQ ID NO: 7270 - DNA, 21 bp, Homo sapiens
gctggagggcggcagcggcga

SEQ ID NO: 7271 - DNA, 18 bp, Homo sapiens
gctggagtccgggcagag

SEQ ID NO: 7272 - DNA, 16 bp, Homo sapiens
gctggagtcggatccc

SEQ ID NO: 7273 - DNA, 18 bp, Homo sapiens
gctggagtcggtgcctga

SEQ ID NO: 7274 - DNA, 20 bp, Homo sapiens
gctggagtcggttacaaagg

SEQ ID NO: 7275 - DNA, 18 bp, Homo sapiens
gctggatcggagcggttt

SEQ ID NO: 7276 - DNA, 17 bp, Homo sapiens
gctggatggcggaaccc

SEQ ID NO: 7277 - DNA, 18 bp, Homo sapiens
gctggcacccaacgtggg

SEQ ID NO: 7278 - DNA, 18 bp, Homo sapiens
gctggcaggtggacaggc

SEQ ID NO: 7279 - DNA, 20 bp, Homo sapiens
gctggccgcgggctcggtac

SEQ ID NO: 7280 - DNA, 19 bp, Homo sapiens
gctggccggtgaggccgcg

SEQ ID NO: 7281 - DNA, 23 bp, Homo sapiens
gctggcggagctgtcgctgcggc

SEQ ID NO: 7282 - DNA, 18 bp, Homo sapiens
gctggcggctcggtgagt

SEQ ID NO: 7283 - DNA, 20 bp, Homo sapiens
gctggcggctctgcagagtc

SEQ ID NO: 7284 - DNA, 21 bp, Homo sapiens
gctggcggctctgcagagtcg

SEQ ID NO: 7285 - DNA, 22 bp, Homo sapiens
gctggcggctctgcagagtcga

SEQ ID NO: 7286 - DNA, 18 bp, Homo sapiens
gctggcggctgaggaggg

SEQ ID NO: 7287 - DNA, 17 bp, Homo sapiens
gctggcgggctggcggc

SEQ ID NO: 7288 - DNA, 18 bp, Homo sapiens
gctggcggttccgttagg

SEQ ID NO: 7289 - DNA, 21 bp, Homo sapiens
gctggctcgggagtagcgcag

SEQ ID NO: 7290 - DNA, 18 bp, Homo sapiens
gctggctgcgtggctcgg

SEQ ID NO: 7291 - DNA, 19 bp, Homo sapiens
cacccgcctgggctagcac

SEQ ID NO: 7292 - DNA, 17 bp, Homo sapiens
cacccggaagcggcgga

SEQ ID NO: 7293 - DNA, 17 bp, Homo sapiens
cacccggacgtgcggct

SEQ ID NO: 7294 - DNA, 19 bp, Homo sapiens
cacccggactacgccatgt

SEQ ID NO: 7295 - DNA, 18 bp, Homo sapiens
cacccggtcaagttgcag

SEQ ID NO: 7296 - DNA, 17 bp, Homo sapiens
caccctccacccctccc

SEQ ID NO: 7297 - DNA, 19 bp, Homo sapiens
caccctggcaaccgcggcg

SEQ ID NO: 7298 - DNA, 21 bp, Homo sapiens
caccgaccgacctccctcacc

SEQ ID NO: 7299 - DNA, 18 bp, Homo sapiens
caccgagcagcttggcta

SEQ ID NO: 7300 - DNA, 17 bp, Homo sapiens
caccgcaggtcgaggac

SEQ ID NO: 7301 - DNA, 16 bp, Homo sapiens
caccgcatcgcgcagc

SEQ ID NO: 7302 - DNA, 18 bp, Homo sapiens
caccgccgagctgcgagc

SEQ ID NO: 7303 - DNA, 18 bp, Homo sapiens
caccgccgaggaaaaccg

SEQ ID NO: 7304 - DNA, 18 bp, Homo sapiens
caccgccgccaccatgcc

SEQ ID NO: 7305 - DNA, 16 bp, Homo sapiens
caccgcggagcagacg

SEQ ID NO: 7306 - DNA, 20 bp, Homo sapiens
caccgcgtgggacggcgtga

SEQ ID NO: 7307 - DNA, 18 bp, Homo sapiens
caccggaaattagtcgaa

SEQ ID NO: 7308 - DNA, 21 bp, Homo sapiens
caccggaaattagtcgaaggc

SEQ ID NO: 7309 - DNA, 19 bp, Homo sapiens
caccggagccaggggagac

SEQ ID NO: 7310 - DNA, 21 bp, Homo sapiens
caccggccccccagccctgcc

SEQ ID NO: 7311 - DNA, 18 bp, Homo sapiens
caccggctgtcgtaaaac

SEQ ID NO: 7312 - DNA, 24 bp, Homo sapiens
cacctcagaactcaggcgtactgc

SEQ ID NO: 7313 - DNA, 16 bp, Homo sapiens
cacctcattcatttct

SEQ ID NO: 7314 - DNA, 22 bp, Homo sapiens
cacctcattcctagggaggagg

SEQ ID NO: 7315 - DNA, 18 bp, Homo sapiens
cacctgacagtaggccgc

SEQ ID NO: 7316 - DNA, 21 bp, Homo sapiens
cacctggactagccgggttgt

SEQ ID NO: 7317 - DNA, 17 bp, Homo sapiens
cacctggttgatcctgc

SEQ ID NO: 7318 - DNA, 20 bp, Homo sapiens
cacctggttgatcctgccag

SEQ ID NO: 7319 - DNA, 21 bp, Homo sapiens
cacctggttgatcctgccagt

SEQ ID NO: 7320 - DNA, 19 bp, Homo sapiens
cacgaaaagagcctgggac

SEQ ID NO: 7321 - DNA, 17 bp, Homo sapiens
cacgaatcgccgcagcc

SEQ ID NO: 7322 - DNA, 15 bp, Homo sapiens
cacgacggggcacca

SEQ ID NO: 7323 - DNA, 19 bp, Homo sapiens
cacgagcagtaggaagcag

SEQ ID NO: 7324 - DNA, 17 bp, Homo sapiens
cacgagcatcgggtagg

SEQ ID NO: 7325 - DNA, 17 bp, Homo sapiens
cacgagggaggaacgcg

SEQ ID NO: 7326 - DNA, 18 bp, Homo sapiens
cacgatctgcgttcgggc

SEQ ID NO: 7327 - DNA, 24 bp, Homo sapiens
cacgatgggaagaggggaaagccc

SEQ ID NO: 7328 - DNA, 20 bp, Homo sapiens
cacgcaagcatggtaggact

SEQ ID NO: 7329 - DNA, 17 bp, Homo sapiens
cacgcacacacgcaagc

SEQ ID NO: 7330 - DNA, 16 bp, Homo sapiens
cacgcaggaggtggtg

SEQ ID NO: 7331 - DNA, 16 bp, Homo sapiens
cacgcagggaccggct

SEQ ID NO: 7332 - DNA, 21 bp, Homo sapiens
cacgcagttcttgggtctgtg

SEQ ID NO: 7333 - DNA, 18 bp, Homo sapiens
cacgcattcacagggcca

SEQ ID NO: 7334 - DNA, 16 bp, Homo sapiens
cacgccagggtgtctg

SEQ ID NO: 7335 - DNA, 18 bp, Homo sapiens
cacgcgagagtagaaggg

SEQ ID NO: 7336 - DNA, 16 bp, Homo sapiens
cacgcgctttcggtgc

SEQ ID NO: 7337 - DNA, 18 bp, Homo sapiens
cacgcggctggcagcgga

SEQ ID NO: 7338 - DNA, 17 bp, Homo sapiens
cacgcgtagtaggacgg

SEQ ID NO: 7339 - DNA, 18 bp, Homo sapiens
cacgcgtagtaggacggt

SEQ ID NO: 7340 - DNA, 24 bp, Homo sapiens
cacgcgtagtaggacggtagccgg

SEQ ID NO: 7341 - DNA, 18 bp, Homo sapiens
cacgctagggggtgcacg

SEQ ID NO: 7342 - DNA, 18 bp, Homo sapiens
cacgctccgactcggccg

SEQ ID NO: 7343 - DNA, 23 bp, Homo sapiens
cacgctggccgtgctggcagtgg

SEQ ID NO: 7344 - DNA, 18 bp, Homo sapiens
cacgctggcctggggcac

SEQ ID NO: 7345 - DNA, 18 bp, Homo sapiens
cacgctggtctgggatag

SEQ ID NO: 7346 - DNA, 19 bp, Homo sapiens
cacgcttgccttcaacatg

SEQ ID NO: 7347 - DNA, 16 bp, Homo sapiens
cacggaaggtggtggc

SEQ ID NO: 7348 - DNA, 20 bp, Homo sapiens
gctgggaaagctgctcaagg

SEQ ID NO: 7349 - DNA, 21 bp, Homo sapiens
gctgggaaggaggctctagat

SEQ ID NO: 7350 - DNA, 18 bp, Homo sapiens
gctgggactgtggcttgc

SEQ ID NO: 7351 - DNA, 18 bp, Homo sapiens
gctgggagagggctctag

SEQ ID NO: 7352 - DNA, 18 bp, Homo sapiens
gctgggagccgccgcccg

SEQ ID NO: 7353 - DNA, 22 bp, Homo sapiens
gctgggagcgggaagactcttt

SEQ ID NO: 7354 - DNA, 18 bp, Homo sapiens
gctgggaggtggagtcgt

SEQ ID NO: 7355 - DNA, 18 bp, Homo sapiens
gctgggatcatggcggag

SEQ ID NO: 7356 - DNA, 19 bp, Homo sapiens
gctgggatggcgaagagca

SEQ ID NO: 7357 - DNA, 20 bp, Homo sapiens
gctgggccggggcaccagtc

SEQ ID NO: 7358 - DNA, 18 bp, Homo sapiens
gctgggcgcgatcctctc

SEQ ID NO: 7359 - DNA, 18 bp, Homo sapiens
gctgggcggcttgggagc

SEQ ID NO: 7360 - DNA, 15 bp, Homo sapiens
gctgggcgggctgaa

SEQ ID NO: 7361 - DNA, 19 bp, Homo sapiens
gctgggcggggatgggctg

SEQ ID NO: 7362 - DNA, 17 bp, Homo sapiens
gctgggctagtcggcgg

SEQ ID NO: 7363 - DNA, 19 bp, Homo sapiens
gctgggctgagaggggagg

SEQ ID NO: 7364 - DNA, 19 bp, Homo sapiens
gctgggctgaggttatggc

SEQ ID NO: 7365 - DNA, 20 bp, Homo sapiens
gctgggctgaggttatggct

SEQ ID NO: 7366 - DNA, 21 bp, Homo sapiens
gctgggctggtagcggcggct

SEQ ID NO: 7367 - DNA, 16 bp, Homo sapiens
gctggggagcggacgc

SEQ ID NO: 7368 - DNA, 21 bp, Homo sapiens
gctggggagcggacgctgcat

SEQ ID NO: 7369 - DNA, 17 bp, Homo sapiens
gctggggcaaccaccgc

SEQ ID NO: 7370 - DNA, 18 bp, Homo sapiens
gctggggcgtgctgtgtg

SEQ ID NO: 7371 - DNA, 20 bp, Homo sapiens
gctggggcgtgctgtgtgct

SEQ ID NO: 7372 - DNA, 17 bp, Homo sapiens
gctggggtagggaggcc

SEQ ID NO: 7373 - DNA, 18 bp, Homo sapiens
gctggggtggcagagccg

SEQ ID NO: 7374 - DNA, 22 bp, Homo sapiens
gctggggtggcagagccgccag

SEQ ID NO: 7375 - DNA, 18 bp, Homo sapiens
gctgggtaagtgagacgg

SEQ ID NO: 7376 - DNA, 18 bp, Homo sapiens
gctgggtacgctgcgcgc

SEQ ID NO: 7377 - DNA, 21 bp, Homo sapiens
gctgggtcgctcgggtcggct

SEQ ID NO: 7378 - DNA, 18 bp, Homo sapiens
gctgggtgcagccgagcg

SEQ ID NO: 7379 - DNA, 21 bp, Homo sapiens
gctgggttgtcacctttcctt

SEQ ID NO: 7380 - DNA, 19 bp, Homo sapiens
gctggtccggaggtagcgg

SEQ ID NO: 7381 - DNA, 17 bp, Homo sapiens
gctggtcggcggcagct

SEQ ID NO: 7382 - DNA, 15 bp, Homo sapiens
gctggtcttcgcggc

SEQ ID NO: 7383 - DNA, 18 bp, Homo sapiens
gctggtgagtttggtgtg

SEQ ID NO: 7384 - DNA, 18 bp, Homo sapiens
gctggtgcggagactgct

SEQ ID NO: 7385 - DNA, 18 bp, Homo sapiens
gctggtggaccgggcggc

SEQ ID NO: 7386 - DNA, 19 bp, Homo sapiens
gctggtggcgtcggcaggt

SEQ ID NO: 7387 - DNA, 24 bp, Homo sapiens
gctggtggctgcggcggcggcggc

SEQ ID NO: 7388 - DNA, 20 bp, Homo sapiens
gctggtgggagttgacgacg

SEQ ID NO: 7389 - DNA, 18 bp, Homo sapiens
gctggttcggaaggtgtc

SEQ ID NO: 7390 - DNA, 18 bp, Homo sapiens
gctggttctgcggcgtgc

SEQ ID NO: 7391 - DNA, 18 bp, Homo sapiens
gctgtaactgcaatttta

SEQ ID NO: 7392 - DNA, 19 bp, Homo sapiens
gctgtaactgcaattttag

SEQ ID NO: 7393 - DNA, 19 bp, Homo sapiens
gctgtaatggcgactgggc

SEQ ID NO: 7394 - DNA, 18 bp, Homo sapiens
gctgtagaagagaacgga

SEQ ID NO: 7395 - DNA, 16 bp, Homo sapiens
gctgtatccgggtcgc

SEQ ID NO: 7396 - DNA, 19 bp, Homo sapiens
gctgtattgaagtgggctg

SEQ ID NO: 7397 - DNA, 19 bp, Homo sapiens
gctgtcaccctcttccccc

SEQ ID NO: 7398 - DNA, 19 bp, Homo sapiens
gctgtcactgtggaaacgg

SEQ ID NO: 7399 - DNA, 19 bp, Homo sapiens
gctgtcagaacggccgatc

SEQ ID NO: 7400 - DNA, 16 bp, Homo sapiens
gctgtcatggaggacg

SEQ ID NO: 7401 - DNA, 17 bp, Homo sapiens
gctgtcatggaggacgc

SEQ ID NO: 7402 - DNA, 18 bp, Homo sapiens
gctgtcatggaggacgcc

SEQ ID NO: 7403 - DNA, 19 bp, Homo sapiens
gctgtcatggaggacgccg

SEQ ID NO: 7404 - DNA, 22 bp, Homo sapiens
gctgtcatggaggacgccgccg

SEQ ID NO: 7405 - DNA, 18 bp, Homo sapiens
cacggaaggtggtggccg

SEQ ID NO: 7406 - DNA, 20 bp, Homo sapiens
cacggaagtgctgggaggcg

SEQ ID NO: 7407 - DNA, 18 bp, Homo sapiens
cacggacccctcgctggg

SEQ ID NO: 7408 - DNA, 19 bp, Homo sapiens
cacggagacagcgccgggg

SEQ ID NO: 7409 - DNA, 18 bp, Homo sapiens
cacggagagggagcccgg

SEQ ID NO: 7410 - DNA, 18 bp, Homo sapiens
cacggagcaggacaaggc

SEQ ID NO: 7411 - DNA, 19 bp, Homo sapiens
cacggagcgacagagcgag

SEQ ID NO: 7412 - DNA, 18 bp, Homo sapiens
cacggaggctggggccag

SEQ ID NO: 7413 - DNA, 18 bp, Homo sapiens
cacggaggggaggtggcg

SEQ ID NO: 7414 - DNA, 18 bp, Homo sapiens
cacggatcatgcggctgg

SEQ ID NO: 7415 - DNA, 24 bp, Homo sapiens
cacggcacaagatggccggagagg

SEQ ID NO: 7416 - DNA, 18 bp, Homo sapiens
cacggcagaagtgagctg

SEQ ID NO: 7417 - DNA, 17 bp, Homo sapiens
cacggcagggacacgcg

SEQ ID NO: 7418 - DNA, 19 bp, Homo sapiens
cacggccaggcggcgcggc

SEQ ID NO: 7419 - DNA, 19 bp, Homo sapiens
cacggcctagcgagtggtt

SEQ ID NO: 7420 - DNA, 18 bp, Homo sapiens
cacggcctgtgaccccgg

SEQ ID NO: 7421 - DNA, 18 bp, Homo sapiens
cacggccttgtgggatgg

SEQ ID NO: 7422 - DNA, 18 bp, Homo sapiens
cacggcgaaatgagactg

SEQ ID NO: 7423 - DNA, 20 bp, Homo sapiens
cacggcgaaatgagactgtt

SEQ ID NO: 7424 - DNA, 22 bp, Homo sapiens
cacggcgaaatgagactgttcg

SEQ ID NO: 7425 - DNA, 21 bp, Homo sapiens
cacggcgcttgcatctcttcg

SEQ ID NO: 7426 - DNA, 18 bp, Homo sapiens
cacggcggcggcagaggc

SEQ ID NO: 7427 - DNA, 22 bp, Homo sapiens
cacggcgggaaccggcagccgg

SEQ ID NO: 7428 - DNA, 20 bp, Homo sapiens
cacggctaagaagagagagg

SEQ ID NO: 7429 - DNA, 18 bp, Homo sapiens
cacggcttcctcagcaga

SEQ ID NO: 7430 - DNA, 20 bp, Homo sapiens
cacgggaattgacacagaac

SEQ ID NO: 7431 - DNA, 18 bp, Homo sapiens
cacgggactgggaagggg

SEQ ID NO: 7432 - DNA, 19 bp, Homo sapiens
cacgggactgggaagggga

SEQ ID NO: 7433 - DNA, 16 bp, Homo sapiens
cacgggaggacgcgag

SEQ ID NO: 7434 - DNA, 19 bp, Homo sapiens
cacgggaggacgcgaggcc

SEQ ID NO: 7435 - DNA, 18 bp, Homo sapiens
cacgggaggacggagagg

SEQ ID NO: 7436 - DNA, 18 bp, Homo sapiens
cacgggagtaaaagatga

SEQ ID NO: 7437 - DNA, 18 bp, Homo sapiens
cacgggatggcggaggcg

SEQ ID NO: 7438 - DNA, 21 bp, Homo sapiens
cacgggctttccacagcgcgg

SEQ ID NO: 7439 - DNA, 22 bp, Homo sapiens
cacggtgtccgagtctttaggt

SEQ ID NO: 7440 - DNA, 20 bp, Homo sapiens
cacggtttcggtagcgacgg

SEQ ID NO: 7441 - DNA, 18 bp, Homo sapiens
cacgtagggcaggaggcc

SEQ ID NO: 7442 - DNA, 18 bp, Homo sapiens
cacgtgaaccgccgacgg

SEQ ID NO: 7443 - DNA, 18 bp, Homo sapiens
cacgtgagctggagccga

SEQ ID NO: 7444 - DNA, 17 bp, Homo sapiens
cacgtggacgcgtctgg

SEQ ID NO: 7445 - DNA, 22 bp, Homo sapiens
cacgtggggaaggaacagcagg

SEQ ID NO: 7446 - DNA, 18 bp, Homo sapiens
cacgtgtctggttccgag

SEQ ID NO: 7447 - DNA, 23 bp, Homo sapiens
cacgttaaaaacactaaggggag

SEQ ID NO: 7448 - DNA, 17 bp, Homo sapiens
cacgttactccgtccga

SEQ ID NO: 7449 - DNA, 18 bp, Homo sapiens
cactagcctcctgccccg

SEQ ID NO: 7450 - DNA, 18 bp, Homo sapiens
cactaggttcgtgggctg

SEQ ID NO: 7451 - DNA, 22 bp, Homo sapiens
cactcaagatggtaggagaatg

SEQ ID NO: 7452 - DNA, 18 bp, Homo sapiens
cactcatgaggagccgga

SEQ ID NO: 7453 - DNA, 24 bp, Homo sapiens
cactccctagcctgttagatggag

SEQ ID NO: 7454 - DNA, 17 bp, Homo sapiens
cactcgagcagccgccg

SEQ ID NO: 7455 - DNA, 21 bp, Homo sapiens
cactcgagccctgggcgctgc

SEQ ID NO: 7456 - DNA, 18 bp, Homo sapiens
cactcgcacaagtggacc

SEQ ID NO: 7457 - DNA, 18 bp, Homo sapiens
cactcgctcagcgaccgc

SEQ ID NO: 7458 - DNA, 16 bp, Homo sapiens
cactcggaggtggcgg

SEQ ID NO: 7459 - DNA, 19 bp, Homo sapiens
cactcggggagaggaggca

SEQ ID NO: 7460 - DNA, 18 bp, Homo sapiens
cactctctcgggttgtta

SEQ ID NO: 7461 - DNA, 19 bp, Homo sapiens
cactctggatcgagtagtg

SEQ ID NO: 7462 - DNA, 16 bp, Homo sapiens
gctgtccccgaggcgg

SEQ ID NO: 7463 - DNA, 18 bp, Homo sapiens
gctgtcctgctgtcacca

SEQ ID NO: 7464 - DNA, 18 bp, Homo sapiens
gctgtcgctgcggcgccc

SEQ ID NO: 7465 - DNA, 18 bp, Homo sapiens
gctgtcggacccagaggg

SEQ ID NO: 7466 - DNA, 16 bp, Homo sapiens
gctgtcggagttgggc

SEQ ID NO: 7467 - DNA, 18 bp, Homo sapiens
gctgtcggcgccggggca

SEQ ID NO: 7468 - DNA, 18 bp, Homo sapiens
gctgtcggtcgctgcagc

SEQ ID NO: 7469 - DNA, 17 bp, Homo sapiens
gctgtctacgtcgggat

SEQ ID NO: 7470 - DNA, 18 bp, Homo sapiens
gctgtctacgtcgggatg

SEQ ID NO: 7471 - DNA, 17 bp, Homo sapiens
gctgtctggctcggtta

SEQ ID NO: 7472 - DNA, 23 bp, Homo sapiens
gctgtgattgagagaggggttag

SEQ ID NO: 7473 - DNA, 19 bp, Homo sapiens
gctgtgcagctctcgccgg

SEQ ID NO: 7474 - DNA, 18 bp, Homo sapiens
gctgtgcagtggaacgcg

SEQ ID NO: 7475 - DNA, 21 bp, Homo sapiens
gctgtgcccatctatcagcag

SEQ ID NO: 7476 - DNA, 23 bp, Homo sapiens
gctgtgcccggcctggccgcggc

SEQ ID NO: 7477 - DNA, 18 bp, Homo sapiens
gctgtgccgggcagatgc

SEQ ID NO: 7478 - DNA, 19 bp, Homo sapiens
gctgtggcctcggggagtg

SEQ ID NO: 7479 - DNA, 18 bp, Homo sapiens
gctgtggtgcagagctag

SEQ ID NO: 7480 - DNA, 18 bp, Homo sapiens
gctgtgtgatggcctcgg

SEQ ID NO: 7481 - DNA, 17 bp, Homo sapiens
gctgttcgtccgggttt

SEQ ID NO: 7482 - DNA, 18 bp, Homo sapiens
gctgttcgtccgggtttt

SEQ ID NO: 7483 - DNA, 18 bp, Homo sapiens
gctgttggtcggtgggtt

SEQ ID NO: 7484 - DNA, 18 bp, Homo sapiens
gctgtttcatctctatgg

SEQ ID NO: 7485 - DNA, 19 bp, Homo sapiens
gctgtttctcggtaagcta

SEQ ID NO: 7486 - DNA, 17 bp, Homo sapiens
gcttaagacggtgaggt

SEQ ID NO: 7487 - DNA, 18 bp, Homo sapiens
gcttactgcgggacggcc

SEQ ID NO: 7488 - DNA, 18 bp, Homo sapiens
gcttagctcggctacctg

SEQ ID NO: 7489 - DNA, 18 bp, Homo sapiens
gcttaggacagttggctg

SEQ ID NO: 7490 - DNA, 16 bp, Homo sapiens
gcttagtcggtggcgg

SEQ ID NO: 7491 - DNA, 20 bp, Homo sapiens
gcttagtggagtgcttaggg

SEQ ID NO: 7492 - DNA, 19 bp, Homo sapiens
gcttagttttgctgccggg

SEQ ID NO: 7493 - DNA, 24 bp, Homo sapiens
gcttcacgtggggttgttggcatt

SEQ ID NO: 7494 - DNA, 21 bp, Homo sapiens
gcttcaggggtgtgaagtcgc

SEQ ID NO: 7495 - DNA, 21 bp, Homo sapiens
gcttcccgaaggtcttggacg

SEQ ID NO: 7496 - DNA, 18 bp, Homo sapiens
gcttccgaggcttccgag

SEQ ID NO: 7497 - DNA, 18 bp, Homo sapiens
gcttccggactccaggta

SEQ ID NO: 7498 - DNA, 18 bp, Homo sapiens
gcttccgggtcggagcca

SEQ ID NO: 7499 - DNA, 19 bp, Homo sapiens
gcttcgcggagctcgggct

SEQ ID NO: 7500 - DNA, 23 bp, Homo sapiens
gcttcgcggcccagggctcactt

SEQ ID NO: 7501 - DNA, 18 bp, Homo sapiens
gcttcggaagcatggatg

SEQ ID NO: 7502 - DNA, 19 bp, Homo sapiens
gcttcggacctcagactgc

SEQ ID NO: 7503 - DNA, 18 bp, Homo sapiens
gcttcgtttacagttcgg

SEQ ID NO: 7504 - DNA, 19 bp, Homo sapiens
gcttcgtttacagttcggc

SEQ ID NO: 7505 - DNA, 17 bp, Homo sapiens
gcttctccatagagggc

SEQ ID NO: 7506 - DNA, 16 bp, Homo sapiens
gcttctccggaaacct

SEQ ID NO: 7507 - DNA, 18 bp, Homo sapiens
gcttctcggaccgcgctg

SEQ ID NO: 7508 - DNA, 17 bp, Homo sapiens
gcttctcttttccttgg

SEQ ID NO: 7509 - DNA, 18 bp, Homo sapiens
gcttctgagggcaagtca

SEQ ID NO: 7510 - DNA, 18 bp, Homo sapiens
gcttgagtcggggggcgg

SEQ ID NO: 7511 - DNA, 19 bp, Homo sapiens
gcttgcatctcttcgcctc

SEQ ID NO: 7512 - DNA, 18 bp, Homo sapiens
gcttgcgtgggaggaagg

SEQ ID NO: 7513 - DNA, 18 bp, Homo sapiens
gcttgctagcgcccaaag

SEQ ID NO: 7514 - DNA, 18 bp, Homo sapiens
gcttgctggcctctcccg

SEQ ID NO: 7515 - DNA, 18 bp, Homo sapiens
gcttggaagaccgacgcg

SEQ ID NO: 7516 - DNA, 18 bp, Homo sapiens
gcttggaggttggcggcg

SEQ ID NO: 7517 - DNA, 18 bp, Homo sapiens
gcttggcgaaactgaggt

SEQ ID NO: 7518 - DNA, 18 bp, Homo sapiens
gcttggcgcctggccgcc

SEQ ID NO: 7519 - DNA, 17 bp, Homo sapiens
cactgaagatggcggct

SEQ ID NO: 7520 - DNA, 18 bp, Homo sapiens
cactgaagtcctcccggc

SEQ ID NO: 7521 - DNA, 20 bp, Homo sapiens
cactgaatgtaagttcaaat

SEQ ID NO: 7522 - DNA, 18 bp, Homo sapiens
cactgacgcactctgcgc

SEQ ID NO: 7523 - DNA, 17 bp, Homo sapiens
cactgagccagggagca

SEQ ID NO: 7524 - DNA, 20 bp, Homo sapiens
cactgcacgacggggctgga

SEQ ID NO: 7525 - DNA, 17 bp, Homo sapiens
cactgcagaccacgggc

SEQ ID NO: 7526 - DNA, 16 bp, Homo sapiens
cactgccactgccacc

SEQ ID NO: 7527 - DNA, 20 bp, Homo sapiens
cactgccaggtggagcattg

SEQ ID NO: 7528 - DNA, 20 bp, Homo sapiens
cactgcgcagggaccggtga

SEQ ID NO: 7529 - DNA, 18 bp, Homo sapiens
cactgctaggggcttaag

SEQ ID NO: 7530 - DNA, 19 bp, Homo sapiens
cactgctcagggaagagcc

SEQ ID NO: 7531 - DNA, 18 bp, Homo sapiens
cactggacgttggcacag

SEQ ID NO: 7532 - DNA, 19 bp, Homo sapiens
cactggagtctcgcgggtc

SEQ ID NO: 7533 - DNA, 20 bp, Homo sapiens
cactggcggcaagagcagac

SEQ ID NO: 7534 - DNA, 18 bp, Homo sapiens
cactgggcaagccgactg

SEQ ID NO: 7535 - DNA, 22 bp, Homo sapiens
cactggggtcttctccatgcgg

SEQ ID NO: 7536 - DNA, 19 bp, Homo sapiens
cactggtcagctggggtcg

SEQ ID NO: 7537 - DNA, 18 bp, Homo sapiens
cactggttggagcgccgc

SEQ ID NO: 7538 - DNA, 19 bp, Homo sapiens
cactgtagatgcgatggcg

SEQ ID NO: 7539 - DNA, 17 bp, Homo sapiens
cactgtcccggtgagcg

SEQ ID NO: 7540 - DNA, 17 bp, Homo sapiens
cactgtggaaacggtaa

SEQ ID NO: 7541 - DNA, 18 bp, Homo sapiens
cactgtggccggggactc

SEQ ID NO: 7542 - DNA, 18 bp, Homo sapiens
cacttaactcgcgccgcc

SEQ ID NO: 7543 - DNA, 23 bp, Homo sapiens
cacttcacggggcgaacatggcg

SEQ ID NO: 7544 - DNA, 16 bp, Homo sapiens
cacttccgcttccttc

SEQ ID NO: 7545 - DNA, 19 bp, Homo sapiens
cacttccgggagcctgggg

SEQ ID NO: 7546 - DNA, 14 bp, Homo sapiens
cacttcgaacgcac

SEQ ID NO: 7547 - DNA, 17 bp, Homo sapiens
cacttctcaaagcatct

SEQ ID NO: 7548 - DNA, 18 bp, Homo sapiens
cacttctcaaagcatctc

SEQ ID NO: 7549 - DNA, 20 bp, Homo sapiens
cacttctcacttccgcttcc

SEQ ID NO: 7550 - DNA, 22 bp, Homo sapiens
cacttctcacttccgcttcctt

SEQ ID NO: 7551 - DNA, 18 bp, Homo sapiens
cacttggacgcgcttgcg

SEQ ID NO: 7552 - DNA, 18 bp, Homo sapiens
cacttggcctgaagacct

SEQ ID NO: 7553 - DNA, 17 bp, Homo sapiens
cactttcaaaatggcgg

SEQ ID NO: 7554 - DNA, 18 bp, Homo sapiens
cactttccacgggtgagg

SEQ ID NO: 7555 - DNA, 16 bp, Homo sapiens
cactttctgacttagg

SEQ ID NO: 7556 - DNA, 16 bp, Homo sapiens
cagaaaaatggtggtg

SEQ ID NO: 7557 - DNA, 16 bp, Homo sapiens
cagaaagtcgacgggc

SEQ ID NO: 7558 - DNA, 18 bp, Homo sapiens
cagaaagtcggcccagca

SEQ ID NO: 7559 - DNA, 21 bp, Homo sapiens
cagaaagttgccggaggtctc

SEQ ID NO: 7560 - DNA, 18 bp, Homo sapiens
cagaaatccgaccggacc

SEQ ID NO: 7561 - DNA, 18 bp, Homo sapiens
cagaacagacactagatg

SEQ ID NO: 7562 - DNA, 21 bp, Homo sapiens
cagaacaggctgacagccagg

SEQ ID NO: 7563 - DNA, 19 bp, Homo sapiens
cagaaccgccatgccggaa

SEQ ID NO: 7564 - DNA, 19 bp, Homo sapiens
cagaacggccgatctccag

SEQ ID NO: 7565 - DNA, 16 bp, Homo sapiens
cagaacgggacgacgg

SEQ ID NO: 7566 - DNA, 18 bp, Homo sapiens
cagaacttggggagccgc

SEQ ID NO: 7567 - DNA, 19 bp, Homo sapiens
cagaacttggggagccgcc

SEQ ID NO: 7568 - DNA, 20 bp, Homo sapiens
cagaagaagggaaggcgcga

SEQ ID NO: 7569 - DNA, 18 bp, Homo sapiens
cagaagcagtgaggatga

SEQ ID NO: 7570 - DNA, 18 bp, Homo sapiens
cagaagggagctgctgtc

SEQ ID NO: 7571 - DNA, 20 bp, Homo sapiens
cagaaggtgcaagccagagc

SEQ ID NO: 7572 - DNA, 18 bp, Homo sapiens
cagaagttggcaggagca

SEQ ID NO: 7573 - DNA, 17 bp, Homo sapiens
cagaatccgtgaacatg

SEQ ID NO: 7574 - DNA, 18 bp, Homo sapiens
cagaatcgaaactgagag

SEQ ID NO: 7575 - DNA, 18 bp, Homo sapiens
cagaatcgcgtttggctg

SEQ ID NO: 7576 - DNA, 18 bp, Homo sapiens
gcttggcggacagacagg

SEQ ID NO: 7577 - DNA, 16 bp, Homo sapiens
gcttggctagaggacg

SEQ ID NO: 7578 - DNA, 17 bp, Homo sapiens
gcttgggagttaggttg

SEQ ID NO: 7579 - DNA, 17 bp, Homo sapiens
gcttgggctttgcaccc

SEQ ID NO: 7580 - DNA, 18 bp, Homo sapiens
gcttgggctttgcacccg

SEQ ID NO: 7581 - DNA, 20 bp, Homo sapiens
gcttgggctttgcacccggc

SEQ ID NO: 7582 - DNA, 16 bp, Homo sapiens
gcttggtagggattgg

SEQ ID NO: 7583 - DNA, 18 bp, Homo sapiens
gcttggtagggattgggg

SEQ ID NO: 7584 - DNA, 16 bp, Homo sapiens
gcttgtcgctgcggtg

SEQ ID NO: 7585 - DNA, 17 bp, Homo sapiens
gcttgtgcgcggacctg

SEQ ID NO: 7586 - DNA, 22 bp, Homo sapiens
gcttgtgtgcggagctgagagg

SEQ ID NO: 7587 - DNA, 18 bp, Homo sapiens
gctttagtgccggcgcca

SEQ ID NO: 7588 - DNA, 18 bp, Homo sapiens
gctttcggcatcagtagg

SEQ ID NO: 7589 - DNA, 18 bp, Homo sapiens
gctttcgggctgatggct

SEQ ID NO: 7590 - DNA, 18 bp, Homo sapiens
gctttctcaactatggcc

SEQ ID NO: 7591 - DNA, 17 bp, Homo sapiens
gctttctcccgaacgcc

SEQ ID NO: 7592 - DNA, 18 bp, Homo sapiens
gctttctcccgaacgcca

SEQ ID NO: 7593 - DNA, 16 bp, Homo sapiens
gctttctccggattct

SEQ ID NO: 7594 - DNA, 18 bp, Homo sapiens
gctttgcgctgggtgacg

SEQ ID NO: 7595 - DNA, 18 bp, Homo sapiens
gctttggcaggtgggtga

SEQ ID NO: 7596 - DNA, 18 bp, Homo sapiens
gctttggcctccggtggg

SEQ ID NO: 7597 - DNA, 18 bp, Homo sapiens
gctttgggaacaggaagg

SEQ ID NO: 7598 - DNA, 21 bp, Homo sapiens
gctttgtggagcgctgcggag

SEQ ID NO: 7599 - DNA, 23 bp, Homo sapiens
gctttgtggagcgctgcggaggg

SEQ ID NO: 7600 - DNA, 18 bp, Homo sapiens
gcttttagtaaaagattg

SEQ ID NO: 7601 - DNA, 18 bp, Homo sapiens
gcttttgagagtcgcggc

SEQ ID NO: 7602 - DNA, 18 bp, Homo sapiens
gcttttgcgcgcgaactg

SEQ ID NO: 7603 - DNA, 18 bp, Homo sapiens
gctttttttttttctccc

SEQ ID NO: 7604 - DNA, 17 bp, Homo sapiens
ggaaaaagcaacaagaa

SEQ ID NO: 7605 - DNA, 16 bp, Homo sapiens
ggaaaaaggtgggggg

SEQ ID NO: 7606 - DNA, 18 bp, Homo sapiens
ggaaaagcgagtgggata

SEQ ID NO: 7607 - DNA, 21 bp, Homo sapiens
ggaaaaggtcccggagagctg

SEQ ID NO: 7608 - DNA, 18 bp, Homo sapiens
ggaaaatagcgccctgtg

SEQ ID NO: 7609 - DNA, 18 bp, Homo sapiens
ggaaacacacggctaaga

SEQ ID NO: 7610 - DNA, 16 bp, Homo sapiens
ggaaacatggcggtcg

SEQ ID NO: 7611 - DNA, 18 bp, Homo sapiens
ggaaaccagaagaaaaat

SEQ ID NO: 7612 - DNA, 17 bp, Homo sapiens
ggaaacccgcgtagccg

SEQ ID NO: 7613 - DNA, 18 bp, Homo sapiens
ggaaaccggaagtaactc

SEQ ID NO: 7614 - DNA, 18 bp, Homo sapiens
ggaaacggcgtggaggct

SEQ ID NO: 7615 - DNA, 17 bp, Homo sapiens
ggaaactggaatttccc

SEQ ID NO: 7616 - DNA, 19 bp, Homo sapiens
ggaaagagagaaggaagga

SEQ ID NO: 7617 - DNA, 18 bp, Homo sapiens
ggaaagatggcgacggct

SEQ ID NO: 7618 - DNA, 18 bp, Homo sapiens
ggaaagcggccggtcgtc

SEQ ID NO: 7619 - DNA, 21 bp, Homo sapiens
ggaaagttctgatcagtgcga

SEQ ID NO: 7620 - DNA, 18 bp, Homo sapiens
ggaaatacgaggcgggcc

SEQ ID NO: 7621 - DNA, 18 bp, Homo sapiens
ggaacacgcattggcagc

SEQ ID NO: 7622 - DNA, 19 bp, Homo sapiens
ggaacccgggcctggctga

SEQ ID NO: 7623 - DNA, 18 bp, Homo sapiens
ggaaccgagcgcagagcc

SEQ ID NO: 7624 - DNA, 17 bp, Homo sapiens
ggaacgagactgcacgg

SEQ ID NO: 7625 - DNA, 18 bp, Homo sapiens
ggaacgcagcgaaggact

SEQ ID NO: 7626 - DNA, 19 bp, Homo sapiens
ggaacgccgagtcggctgc

SEQ ID NO: 7627 - DNA, 21 bp, Homo sapiens
ggaacgcgcgcccgcggggta

SEQ ID NO: 7628 - DNA, 18 bp, Homo sapiens
ggaactagctggagggca

SEQ ID NO: 7629 - DNA, 18 bp, Homo sapiens
ggaactctgaggtgaggg

SEQ ID NO: 7630 - DNA, 14 bp, Homo sapiens
ggaactggcgcccg

SEQ ID NO: 7631 - DNA, 17 bp, Homo sapiens
ggaacttcccagacgcc

SEQ ID NO: 7632 - DNA, 21 bp, Homo sapiens
ggaactttccagaacgctcgg

SEQ ID NO: 7633 - DNA, 18 bp, Homo sapiens
cagaatgtggcggacgtg

SEQ ID NO: 7634 - DNA, 18 bp, Homo sapiens
cagacaagcaggccccca

SEQ ID NO: 7635 - DNA, 18 bp, Homo sapiens
cagacaaggggtgactgc

SEQ ID NO: 7636 - DNA, 18 bp, Homo sapiens
cagacacgccttagcgcc

SEQ ID NO: 7637 - DNA, 17 bp, Homo sapiens
cagacagtgcaggacga

SEQ ID NO: 7638 - DNA, 18 bp, Homo sapiens
cagacagtgcaggacgag

SEQ ID NO: 7639 - DNA, 18 bp, Homo sapiens
cagaccacgggccgaggc

SEQ ID NO: 7640 - DNA, 18 bp, Homo sapiens
cagaccattgattcccga

SEQ ID NO: 7641 - DNA, 17 bp, Homo sapiens
cagacccggaagcggat

SEQ ID NO: 7642 - DNA, 20 bp, Homo sapiens
cagaccgccctccggatcgg

SEQ ID NO: 7643 - DNA, 19 bp, Homo sapiens
cagacgcccggtgaattct

SEQ ID NO: 7644 - DNA, 18 bp, Homo sapiens
cagacggccatttgtggc

SEQ ID NO: 7645 - DNA, 18 bp, Homo sapiens
cagacggtgaggaccctg

SEQ ID NO: 7646 - DNA, 18 bp, Homo sapiens
cagacgtccagagcagag

SEQ ID NO: 7647 - DNA, 17 bp, Homo sapiens
cagactcccttttcttt

SEQ ID NO: 7648 - DNA, 20 bp, Homo sapiens
cagactgagcgcgtccaggc

SEQ ID NO: 7649 - DNA, 16 bp, Homo sapiens
cagactgcgggacgga

SEQ ID NO: 7650 - DNA, 18 bp, Homo sapiens
cagactgctgcagcccta

SEQ ID NO: 7651 - DNA, 16 bp, Homo sapiens
cagacttcagaaggac

SEQ ID NO: 7652 - DNA, 18 bp, Homo sapiens
cagacttcagaaggacac

SEQ ID NO: 7653 - DNA, 16 bp, Homo sapiens
cagagaagggaaacac

SEQ ID NO: 7654 - DNA, 18 bp, Homo sapiens
cagagaagggaaacacac

SEQ ID NO: 7655 - DNA, 19 bp, Homo sapiens
cagagacagaaagaaacgc

SEQ ID NO: 7656 - DNA, 20 bp, Homo sapiens
cagagacagaaagaaacgca

SEQ ID NO: 7657 - DNA, 19 bp, Homo sapiens
cagagacagacaggatgga

SEQ ID NO: 7658 - DNA, 17 bp, Homo sapiens
cagagacgtagaaggcg

SEQ ID NO: 7659 - DNA, 19 bp, Homo sapiens
cagagactgacgagtgcgg

SEQ ID NO: 7660 - DNA, 17 bp, Homo sapiens
cagagagagtcgggtta

SEQ ID NO: 7661 - DNA, 18 bp, Homo sapiens
cagagagattggtgtttt

SEQ ID NO: 7662 - DNA, 19 bp, Homo sapiens
cagagaggcttgaggttcg

SEQ ID NO: 7663 - DNA, 19 bp, Homo sapiens
cagagatggtggaaggacc

SEQ ID NO: 7664 - DNA, 19 bp, Homo sapiens
cagagcaaagcgtcggagt

SEQ ID NO: 7665 - DNA, 20 bp, Homo sapiens
cagagcagggcagaactggg

SEQ ID NO: 7666 - DNA, 20 bp, Homo sapiens
cagagcaggttcaaacacag

SEQ ID NO: 7667 - DNA, 18 bp, Homo sapiens
cagagcccgggcggctac

SEQ ID NO: 7668 - DNA, 18 bp, Homo sapiens
cagagccgcagtgccgta

SEQ ID NO: 7669 - DNA, 22 bp, Homo sapiens
cagagcgatccccgggcccaga

SEQ ID NO: 7670 - DNA, 18 bp, Homo sapiens
cagagcggagcggagctg

SEQ ID NO: 7671 - DNA, 20 bp, Homo sapiens
cagagcggagcggagctgtg

SEQ ID NO: 7672 - DNA, 20 bp, Homo sapiens
cagagcggatgtgaggggcg

SEQ ID NO: 7673 - DNA, 23 bp, Homo sapiens
cagagcgtcgggatatcgggtgg

SEQ ID NO: 7674 - DNA, 17 bp, Homo sapiens
cagagctcagcgagaag

SEQ ID NO: 7675 - DNA, 18 bp, Homo sapiens
cagagctcgccactcctt

SEQ ID NO: 7676 - DNA, 20 bp, Homo sapiens
cagagctggagtgaagggag

SEQ ID NO: 7677 - DNA, 16 bp, Homo sapiens
cagagcttgagggcag

SEQ ID NO: 7678 - DNA, 17 bp, Homo sapiens
cagaggagccggagacg

SEQ ID NO: 7679 - DNA, 18 bp, Homo sapiens
cagaggaggagcgcagcc

SEQ ID NO: 7680 - DNA, 18 bp, Homo sapiens
cagaggaggagcttgctg

SEQ ID NO: 7681 - DNA, 17 bp, Homo sapiens
cagaggagtcgtagcgg

SEQ ID NO: 7682 - DNA, 18 bp, Homo sapiens
cagaggcagggaccactc

SEQ ID NO: 7683 - DNA, 18 bp, Homo sapiens
cagaggccggggagagcg

SEQ ID NO: 7684 - DNA, 18 bp, Homo sapiens
cagaggctgctgaggcgc

SEQ ID NO: 7685 - DNA, 17 bp, Homo sapiens
cagagtctacttcagaa

SEQ ID NO: 7686 - DNA, 23 bp, Homo sapiens
cagagtctgcgatcttcccagca

SEQ ID NO: 7687 - DNA, 16 bp, Homo sapiens
cagagtgctccgcggc

SEQ ID NO: 7688 - DNA, 18 bp, Homo sapiens
cagagtggggcacagcga

SEQ ID NO: 7689 - DNA, 19 bp, Homo sapiens
cagagtgggggactaggtg

SEQ ID NO: 7690 - DNA, 16 bp, Homo sapiens
ggaagacggaagccca

SEQ ID NO: 7691 - DNA, 18 bp, Homo sapiens
ggaagagccggccgaagc

SEQ ID NO: 7692 - DNA, 20 bp, Homo sapiens
ggaagaggcggaggtggagg

SEQ ID NO: 7693 - DNA, 17 bp, Homo sapiens
ggaagaggctgactgta

SEQ ID NO: 7694 - DNA, 21 bp, Homo sapiens
ggaagagggaagtcgtggtgg

SEQ ID NO: 7695 - DNA, 17 bp, Homo sapiens
ggaagccggacgtgggc

SEQ ID NO: 7696 - DNA, 18 bp, Homo sapiens
ggaagcggcgagtctcca

SEQ ID NO: 7697 - DNA, 18 bp, Homo sapiens
ggaagcgggggtgcagcg

SEQ ID NO: 7698 - DNA, 23 bp, Homo sapiens
ggaagcggttccggagtcagccc

SEQ ID NO: 7699 - DNA, 18 bp, Homo sapiens
ggaagcgttacttgaggc

SEQ ID NO: 7700 - DNA, 19 bp, Homo sapiens
ggaagctagtgcgctgtaa

SEQ ID NO: 7701 - DNA, 16 bp, Homo sapiens
ggaaggagctagacgg

SEQ ID NO: 7702 - DNA, 18 bp, Homo sapiens
ggaaggattaagcggctt

SEQ ID NO: 7703 - DNA, 19 bp, Homo sapiens
ggaaggcttgcgccagctc

SEQ ID NO: 7704 - DNA, 22 bp, Homo sapiens
ggaagggaacgggaacggccat

SEQ ID NO: 7705 - DNA, 18 bp, Homo sapiens
ggaagggccggcggacgc

SEQ ID NO: 7706 - DNA, 19 bp, Homo sapiens
ggaagggggctgggaagct

SEQ ID NO: 7707 - DNA, 18 bp, Homo sapiens
ggaaggtacactataggc

SEQ ID NO: 7708 - DNA, 18 bp, Homo sapiens
ggaagtaaagatcacagg

SEQ ID NO: 7709 - DNA, 15 bp, Homo sapiens
ggaagtagcagtcct

SEQ ID NO: 7710 - DNA, 18 bp, Homo sapiens
ggaagtagccgctccgag

SEQ ID NO: 7711 - DNA, 18 bp, Homo sapiens
ggaagtccccgccgggtg

SEQ ID NO: 7712 - DNA, 20 bp, Homo sapiens
ggaagtcgcgaccagagcca

SEQ ID NO: 7713 - DNA, 18 bp, Homo sapiens
ggaagtcggagtttgagc

SEQ ID NO: 7714 - DNA, 18 bp, Homo sapiens
ggaagtctctgaacaggc

SEQ ID NO: 7715 - DNA, 17 bp, Homo sapiens
ggaagtgaggcaccctc

SEQ ID NO: 7716 - DNA, 18 bp, Homo sapiens
ggaagtgcgtaccggaag

SEQ ID NO: 7717 - DNA, 20 bp, Homo sapiens
ggaagtggccagttcaggag

SEQ ID NO: 7718 - DNA, 19 bp, Homo sapiens
ggaagtggcccctcgcgcg

SEQ ID NO: 7719 - DNA, 16 bp, Homo sapiens
ggaagtggggtgcacg

SEQ ID NO: 7720 - DNA, 22 bp, Homo sapiens
ggaagtggtcacggaactcggc

SEQ ID NO: 7721 - DNA, 19 bp, Homo sapiens
ggaagtgtctcttagcagc

SEQ ID NO: 7722 - DNA, 21 bp, Homo sapiens
ggaagtgtggcttcgtttaca

SEQ ID NO: 7723 - DNA, 21 bp, Homo sapiens
ggaagttctttcccggcctcc

SEQ ID NO: 7724 - DNA, 17 bp, Homo sapiens
ggaagttgggcccaggc

SEQ ID NO: 7725 - DNA, 18 bp, Homo sapiens
ggaatcgcggaaaccgcc

SEQ ID NO: 7726 - DNA, 16 bp, Homo sapiens
ggaatctgctagggca

SEQ ID NO: 7727 - DNA, 18 bp, Homo sapiens
ggacaactgggtcttttg

SEQ ID NO: 7728 - DNA, 18 bp, Homo sapiens
ggacacgaccaagatggc

SEQ ID NO: 7729 - DNA, 17 bp, Homo sapiens
ggacacttcggtcctga

SEQ ID NO: 7730 - DNA, 19 bp, Homo sapiens
ggacacttcggtcctgagc

SEQ ID NO: 7731 - DNA, 17 bp, Homo sapiens
ggacagaagcgggctat

SEQ ID NO: 7732 - DNA, 18 bp, Homo sapiens
ggacagagcaggctccta

SEQ ID NO: 7733 - DNA, 17 bp, Homo sapiens
ggacagcacagtccctc

SEQ ID NO: 7734 - DNA, 21 bp, Homo sapiens
ggaccctgcagggcgggactt

SEQ ID NO: 7735 - DNA, 17 bp, Homo sapiens
ggaccgacggtgtgtgc

SEQ ID NO: 7736 - DNA, 18 bp, Homo sapiens
ggaccgagctgctgtcag

SEQ ID NO: 7737 - DNA, 23 bp, Homo sapiens
ggaccgccgtgcgggagcccaga

SEQ ID NO: 7738 - DNA, 18 bp, Homo sapiens
ggaccggcctggagatgg

SEQ ID NO: 7739 - DNA, 17 bp, Homo sapiens
ggaccggcgaggaatag

SEQ ID NO: 7740 - DNA, 17 bp, Homo sapiens
ggacctagctcgggacc

SEQ ID NO: 7741 - DNA, 19 bp, Homo sapiens
ggacctagggagcacgtta

SEQ ID NO: 7742 - DNA, 18 bp, Homo sapiens
ggacctaggtcgcggcga

SEQ ID NO: 7743 - DNA, 20 bp, Homo sapiens
ggacctaggtcgcggcgaca

SEQ ID NO: 7744 - DNA, 18 bp, Homo sapiens
ggacctcgcgcggacgga

SEQ ID NO: 7745 - DNA, 21 bp, Homo sapiens
ggacgccaacatccgggccgc

SEQ ID NO: 7746 - DNA, 19 bp, Homo sapiens
ggacgccagctcagggcgg

SEQ ID NO: 7747 - DNA, 19 bp, Homo sapiens
cagagtgtggtcaggcggc

SEQ ID NO: 7748 - DNA, 20 bp, Homo sapiens
cagataaatcggcgggccgg

SEQ ID NO: 7749 - DNA, 21 bp, Homo sapiens
cagatcaaagtggtgggactc

SEQ ID NO: 7750 - DNA, 17 bp, Homo sapiens
cagatcccgaggtccga

SEQ ID NO: 7751 - DNA, 24 bp, Homo sapiens
cagatcgccgaagcgtcggactac

SEQ ID NO: 7752 - DNA, 18 bp, Homo sapiens
cagatgccaacatggcag

SEQ ID NO: 7753 - DNA, 20 bp, Homo sapiens
cagatggagaatggagccga

SEQ ID NO: 7754 - DNA, 17 bp, Homo sapiens
cagattgcaaagcgcct

SEQ ID NO: 7755 - DNA, 20 bp, Homo sapiens
cagatttaacagctgtggtt

SEQ ID NO: 7756 - DNA, 18 bp, Homo sapiens
cagcaagggcttgggaag

SEQ ID NO: 7757 - DNA, 20 bp, Homo sapiens
cagcaagggcttgggaagtg

SEQ ID NO: 7758 - DNA, 21 bp, Homo sapiens
cagcaattgggggaaagaagg

SEQ ID NO: 7759 - DNA, 20 bp, Homo sapiens
cagcaccatggacccccgct

SEQ ID NO: 7760 - DNA, 18 bp, Homo sapiens
cagcacggcgggaaccgg

SEQ ID NO: 7761 - DNA, 23 bp, Homo sapiens
cagcacgtagagggaatgagtca

SEQ ID NO: 7762 - DNA, 20 bp, Homo sapiens
cagcactgcgcagggaccgg

SEQ ID NO: 7763 - DNA, 24 bp, Homo sapiens
cagcactgcgcagggaccggtgag

SEQ ID NO: 7764 - DNA, 23 bp, Homo sapiens
cagcacttggagcgcagaaccgg

SEQ ID NO: 7765 - DNA, 21 bp, Homo sapiens
cagcagagactcgggctcgtc

SEQ ID NO: 7766 - DNA, 19 bp, Homo sapiens
cagcagcacgacggggcct

SEQ ID NO: 7767 - DNA, 18 bp, Homo sapiens
cagcagcagcagcagcag

SEQ ID NO: 7768 - DNA, 19 bp, Homo sapiens
cagcagcagcagcagcagc

SEQ ID NO: 7769 - DNA, 17 bp, Homo sapiens
cagcagcagtggtggaa

SEQ ID NO: 7770 - DNA, 20 bp, Homo sapiens
cagcagcccgacgcaagagg

SEQ ID NO: 7771 - DNA, 18 bp, Homo sapiens
cagcagccgaggccacca

SEQ ID NO: 7772 - DNA, 21 bp, Homo sapiens
cagcagccgcccggaccgggc

SEQ ID NO: 7773 - DNA, 19 bp, Homo sapiens
cagcagcctcccccttgag

SEQ ID NO: 7774 - DNA, 24 bp, Homo sapiens
cagcagcgcagcgggcgcgccgct

SEQ ID NO: 7775 - DNA, 16 bp, Homo sapiens
cagcagcgccgcagcc

SEQ ID NO: 7776 - DNA, 17 bp, Homo sapiens
cagcagctgcgggagac

SEQ ID NO: 7777 - DNA, 20 bp, Homo sapiens
cagcagctgggggaagaatc

SEQ ID NO: 7778 - DNA, 20 bp, Homo sapiens
cagcagggcgaggctccagg

SEQ ID NO: 7779 - DNA, 19 bp, Homo sapiens
cagcaggggaaggggaacg

SEQ ID NO: 7780 - DNA, 18 bp, Homo sapiens
cagcaggtagcaaagtga

SEQ ID NO: 7781 - DNA, 18 bp, Homo sapiens
cagcaggtccagagctgc

SEQ ID NO: 7782 - DNA, 17 bp, Homo sapiens
cagcagtggtcttgctc

SEQ ID NO: 7783 - DNA, 17 bp, Homo sapiens
cagcatgagccggaccc

SEQ ID NO: 7784 - DNA, 18 bp, Homo sapiens
cagcatggaccgcacttg

SEQ ID NO: 7785 - DNA, 18 bp, Homo sapiens
cagcatgggcgatggggg

SEQ ID NO: 7786 - DNA, 16 bp, Homo sapiens
cagcatgtcggggacc

SEQ ID NO: 7787 - DNA, 18 bp, Homo sapiens
cagcattcggcagagggc

SEQ ID NO: 7788 - DNA, 19 bp, Homo sapiens
cagcattcggcagagggcg

SEQ ID NO: 7789 - DNA, 17 bp, Homo sapiens
cagcattcgggccgaga

SEQ ID NO: 7790 - DNA, 20 bp, Homo sapiens
cagcattcgggccgagatgt

SEQ ID NO: 7791 - DNA, 20 bp, Homo sapiens
cagccaacccagatcccgag

SEQ ID NO: 7792 - DNA, 18 bp, Homo sapiens
cagccaagatggtgaagc

SEQ ID NO: 7793 - DNA, 18 bp, Homo sapiens
cagccaccaggcaccacc

SEQ ID NO: 7794 - DNA, 18 bp, Homo sapiens
cagccactcagcccttcg

SEQ ID NO: 7795 - DNA, 18 bp, Homo sapiens
cagccacttcctcttgaa

SEQ ID NO: 7796 - DNA, 15 bp, Homo sapiens
cagccaggcggcggc

SEQ ID NO: 7797 - DNA, 20 bp, Homo sapiens
cagccaggctgcggagcgga

SEQ ID NO: 7798 - DNA, 24 bp, Homo sapiens
cagccaggctgcggagcggacgga

SEQ ID NO: 7799 - DNA, 16 bp, Homo sapiens
cagccaggggtgcccg

SEQ ID NO: 7800 - DNA, 20 bp, Homo sapiens
cagccatcttgtttgtttga

SEQ ID NO: 7801 - DNA, 18 bp, Homo sapiens
cagccatggcgacatcct

SEQ ID NO: 7802 - DNA, 19 bp, Homo sapiens
cagccccggcgccccgaag

SEQ ID NO: 7803 - DNA, 18 bp, Homo sapiens
cagcccctcctctttccc

SEQ ID NO: 7804 - DNA, 18 bp, Homo sapiens
ggacgccatttccagcgg

SEQ ID NO: 7805 - DNA, 20 bp, Homo sapiens
ggacgccctcctgcacatgc

SEQ ID NO: 7806 - DNA, 17 bp, Homo sapiens
ggacgccgttgggcacc

SEQ ID NO: 7807 - DNA, 16 bp, Homo sapiens
ggacgcgcccacaggc

SEQ ID NO: 7808 - DNA, 16 bp, Homo sapiens
ggacgcgcgggctcgg

SEQ ID NO: 7809 - DNA, 18 bp, Homo sapiens
ggacgcggagcgagaggc

SEQ ID NO: 7810 - DNA, 18 bp, Homo sapiens
ggacggaaagggagacgc

SEQ ID NO: 7811 - DNA, 17 bp, Homo sapiens
ggacggagccggcgagc

SEQ ID NO: 7812 - DNA, 19 bp, Homo sapiens
ggacggatgaaagtacggg

SEQ ID NO: 7813 - DNA, 22 bp, Homo sapiens
ggacgtcgggagcaggatggcg

SEQ ID NO: 7814 - DNA, 17 bp, Homo sapiens
ggactagccgggttgta

SEQ ID NO: 7815 - DNA, 20 bp, Homo sapiens
ggactcaagatggcggcgtg

SEQ ID NO: 7816 - DNA, 19 bp, Homo sapiens
ggactcggcaagaaccagc

SEQ ID NO: 7817 - DNA, 19 bp, Homo sapiens
ggactcggcccagaagccg

SEQ ID NO: 7818 - DNA, 19 bp, Homo sapiens
ggactcggccccatggaga

SEQ ID NO: 7819 - DNA, 18 bp, Homo sapiens
ggactcttcctggagaca

SEQ ID NO: 7820 - DNA, 19 bp, Homo sapiens
ggactggccggcctgggcg

SEQ ID NO: 7821 - DNA, 22 bp, Homo sapiens
ggacttagagagtggggacgtc

SEQ ID NO: 7822 - DNA, 18 bp, Homo sapiens
ggacttccaatatgacga

SEQ ID NO: 7823 - DNA, 21 bp, Homo sapiens
ggacttcctgtactttttaga

SEQ ID NO: 7824 - DNA, 18 bp, Homo sapiens
ggacttggaaaagcaagg

SEQ ID NO: 7825 - DNA, 21 bp, Homo sapiens
ggacttttggcccgtttcggt

SEQ ID NO: 7826 - DNA, 19 bp, Homo sapiens
ggagaaaaggactcaggtg

SEQ ID NO: 7827 - DNA, 17 bp, Homo sapiens
ggagaaaggaaaccgaa

SEQ ID NO: 7828 - DNA, 18 bp, Homo sapiens
ggagaaaggtggcggcgc

SEQ ID NO: 7829 - DNA, 17 bp, Homo sapiens
ggagaacacagttggag

SEQ ID NO: 7830 - DNA, 17 bp, Homo sapiens
ggagaacagcggtcgcg

SEQ ID NO: 7831 - DNA, 20 bp, Homo sapiens
ggagaagaagaagatcggta

SEQ ID NO: 7832 - DNA, 19 bp, Homo sapiens
ggagaagagggtataggga

SEQ ID NO: 7833 - DNA, 18 bp, Homo sapiens
ggagaaggtggagggaga

SEQ ID NO: 7834 - DNA, 18 bp, Homo sapiens
ggagaatgtagtgaagct

SEQ ID NO: 7835 - DNA, 20 bp, Homo sapiens
ggagacaagatccgatctac

SEQ ID NO: 7836 - DNA, 20 bp, Homo sapiens
ggagacacaacaaagatggc

SEQ ID NO: 7837 - DNA, 21 bp, Homo sapiens
ggagacagcgcagtttgaatc

SEQ ID NO: 7838 - DNA, 17 bp, Homo sapiens
ggagacagtgtggaggc

SEQ ID NO: 7839 - DNA, 18 bp, Homo sapiens
ggagaccaacggaccgga

SEQ ID NO: 7840 - DNA, 17 bp, Homo sapiens
ggagaccggagaagctg

SEQ ID NO: 7841 - DNA, 18 bp, Homo sapiens
ggagacggttagaaatgg

SEQ ID NO: 7842 - DNA, 17 bp, Homo sapiens
ggagacgtaggagtggg

SEQ ID NO: 7843 - DNA, 19 bp, Homo sapiens
ggagactgaaggtaaagcc

SEQ ID NO: 7844 - DNA, 18 bp, Homo sapiens
ggagacttccgccctcgc

SEQ ID NO: 7845 - DNA, 18 bp, Homo sapiens
ggagacttcggggccaag

SEQ ID NO: 7846 - DNA, 20 bp, Homo sapiens
ggagagaagatggcggaagc

SEQ ID NO: 7847 - DNA, 21 bp, Homo sapiens
ggagagagaccgctgtaagtg

SEQ ID NO: 7848 - DNA, 18 bp, Homo sapiens
ggagagatggcggagttg

SEQ ID NO: 7849 - DNA, 20 bp, Homo sapiens
ggagagcctagattacggaa

SEQ ID NO: 7850 - DNA, 19 bp, Homo sapiens
ggagaggagcatctctgtg

SEQ ID NO: 7851 - DNA, 19 bp, Homo sapiens
ggagagggcaggagcgcgc

SEQ ID NO: 7852 - DNA, 19 bp, Homo sapiens
ggagagggcgagaagggca

SEQ ID NO: 7853 - DNA, 22 bp, Homo sapiens
ggagagtctcaaaatcctaagg

SEQ ID NO: 7854 - DNA, 17 bp, Homo sapiens
ggagagtgtgctcttta

SEQ ID NO: 7855 - DNA, 18 bp, Homo sapiens
ggagagttctacgaggga

SEQ ID NO: 7856 - DNA, 17 bp, Homo sapiens
ggagatggctgcggccg

SEQ ID NO: 7857 - DNA, 16 bp, Homo sapiens
ggagattgctgggcgg

SEQ ID NO: 7858 - DNA, 20 bp, Homo sapiens
ggagattgctgggcggttct

SEQ ID NO: 7859 - DNA, 21 bp, Homo sapiens
ggagattgctgggcggttctt

SEQ ID NO: 7860 - DNA, 16 bp, Homo sapiens
ggagcaacgcgactga

SEQ ID NO: 7861 - DNA, 17 bp, Homo sapiens
cagcccgaagggagctg

SEQ ID NO: 7862 - DNA, 16 bp, Homo sapiens
cagcccgattttctgc

SEQ ID NO: 7863 - DNA, 22 bp, Homo sapiens
cagcccgccccagccgaggttc

SEQ ID NO: 7864 - DNA, 18 bp, Homo sapiens
cagcccgtgccaccacac

SEQ ID NO: 7865 - DNA, 18 bp, Homo sapiens
cagccctttaggctgcgg

SEQ ID NO: 7866 - DNA, 23 bp, Homo sapiens
cagccgagcgcggccaaggactg

SEQ ID NO: 7867 - DNA, 17 bp, Homo sapiens
cagccgccaccacgctg

SEQ ID NO: 7868 - DNA, 18 bp, Homo sapiens
cagccgccattgtcgcgc

SEQ ID NO: 7869 - DNA, 20 bp, Homo sapiens
cagccgcgcgtctttaaaca

SEQ ID NO: 7870 - DNA, 19 bp, Homo sapiens
cagccgcggcccgggctca

SEQ ID NO: 7871 - DNA, 23 bp, Homo sapiens
cagccgctcgctgaggtagtctc

SEQ ID NO: 7872 - DNA, 16 bp, Homo sapiens
cagccggacataacgg

SEQ ID NO: 7873 - DNA, 16 bp, Homo sapiens
cagccggaggatcgcg

SEQ ID NO: 7874 - DNA, 17 bp, Homo sapiens
cagccggcttggctagc

SEQ ID NO: 7875 - DNA, 18 bp, Homo sapiens
cagccgggaacgcgcctc

SEQ ID NO: 7876 - DNA, 18 bp, Homo sapiens
cagccgggctgccagcgg

SEQ ID NO: 7877 - DNA, 15 bp, Homo sapiens
cagccgtaacgacct

SEQ ID NO: 7878 - DNA, 18 bp, Homo sapiens
cagcctcagtcggacggg

SEQ ID NO: 7879 - DNA, 20 bp, Homo sapiens
cagcctccgggggaggggac

SEQ ID NO: 7880 - DNA, 23 bp, Homo sapiens
cagcctcttccgcctgagccccg

SEQ ID NO: 7881 - DNA, 23 bp, Homo sapiens
cagcctgagctgcagaggattcc

SEQ ID NO: 7882 - DNA, 18 bp, Homo sapiens
cagcctgcgttcgccatg

SEQ ID NO: 7883 - DNA, 18 bp, Homo sapiens
cagcctggaaggtgcgtg

SEQ ID NO: 7884 - DNA, 17 bp, Homo sapiens
cagccttccccgcgagc

SEQ ID NO: 7885 - DNA, 19 bp, Homo sapiens
cagccttccccgcgagcgg

SEQ ID NO: 7886 - DNA, 20 bp, Homo sapiens
cagccttgtaagtaacgccg

SEQ ID NO: 7887 - DNA, 19 bp, Homo sapiens
cagcgacgcggtgacgcca

SEQ ID NO: 7888 - DNA, 18 bp, Homo sapiens
cagcgagatacggggaga

SEQ ID NO: 7889 - DNA, 19 bp, Homo sapiens
cagcgagcggagccgcggt

SEQ ID NO: 7890 - DNA, 18 bp, Homo sapiens
cagcgagcggctgcagcg

SEQ ID NO: 7891 - DNA, 18 bp, Homo sapiens
cagcgagggtctggcggc

SEQ ID NO: 7892 - DNA, 19 bp, Homo sapiens
cagcgatccgcgggctggc

SEQ ID NO: 7893 - DNA, 18 bp, Homo sapiens
cagcgatgcctgcccggc

SEQ ID NO: 7894 - DNA, 18 bp, Homo sapiens
cagcgatggacggtcggg

SEQ ID NO: 7895 - DNA, 17 bp, Homo sapiens
cagcgatggatgtggat

SEQ ID NO: 7896 - DNA, 18 bp, Homo sapiens
cagcgatggatgtggata

SEQ ID NO: 7897 - DNA, 19 bp, Homo sapiens
cagcgatggatgtggatac

SEQ ID NO: 7898 - DNA, 18 bp, Homo sapiens
cagcgatggcggagagtc

SEQ ID NO: 7899 - DNA, 18 bp, Homo sapiens
cagcgcaaccaaatccga

SEQ ID NO: 7900 - DNA, 21 bp, Homo sapiens
cagcgcagctagaccgcgggg

SEQ ID NO: 7901 - DNA, 17 bp, Homo sapiens
cagcgcagtttgaatcg

SEQ ID NO: 7902 - DNA, 18 bp, Homo sapiens
cagcgcagtttgaatcgc

SEQ ID NO: 7903 - DNA, 17 bp, Homo sapiens
cagcgccccagcgagga

SEQ ID NO: 7904 - DNA, 22 bp, Homo sapiens
cagcgccggggccggcggctgc

SEQ ID NO: 7905 - DNA, 22 bp, Homo sapiens
cagcgcctgcaggttccgggag

SEQ ID NO: 7906 - DNA, 18 bp, Homo sapiens
cagcgcctgcgggagcgg

SEQ ID NO: 7907 - DNA, 18 bp, Homo sapiens
cagcgcgcgcaagcgagg

SEQ ID NO: 7908 - DNA, 19 bp, Homo sapiens
cagcgcggacgccggagct

SEQ ID NO: 7909 - DNA, 18 bp, Homo sapiens
cagcgcggagactgggta

SEQ ID NO: 7910 - DNA, 18 bp, Homo sapiens
cagcgctcattcggccga

SEQ ID NO: 7911 - DNA, 16 bp, Homo sapiens
cagcgctctgggccgc

SEQ ID NO: 7912 - DNA, 17 bp, Homo sapiens
cagcgctgaggactggc

SEQ ID NO: 7913 - DNA, 18 bp, Homo sapiens
cagcgctggcagacaccg

SEQ ID NO: 7914 - DNA, 16 bp, Homo sapiens
cagcggacggacagtg

SEQ ID NO: 7915 - DNA, 18 bp, Homo sapiens
cagcggagaaacgggacc

SEQ ID NO: 7916 - DNA, 18 bp, Homo sapiens
cagcggagagtaggcatg

SEQ ID NO: 7917 - DNA, 15 bp, Homo sapiens
cagcggagtaggggc

SEQ ID NO: 7918 - DNA, 18 bp, Homo sapiens
ggagcacagggcgagctc

SEQ ID NO: 7919 - DNA, 20 bp, Homo sapiens
ggagcacagggcgagctctc

SEQ ID NO: 7920 - DNA, 21 bp, Homo sapiens
ggagcacgggcaaggcggaga

SEQ ID NO: 7921 - DNA, 21 bp, Homo sapiens
ggagcagcgggcaggactgcc

SEQ ID NO: 7922 - DNA, 17 bp, Homo sapiens
ggagcaggagatttcgg

SEQ ID NO: 7923 - DNA, 19 bp, Homo sapiens
ggagcagtggtcggagatg

SEQ ID NO: 7924 - DNA, 18 bp, Homo sapiens
ggagcatggagggacggc

SEQ ID NO: 7925 - DNA, 18 bp, Homo sapiens
ggagccaaaatatctccg

SEQ ID NO: 7926 - DNA, 16 bp, Homo sapiens
ggagcccggcgggcgc

SEQ ID NO: 7927 - DNA, 17 bp, Homo sapiens
ggagcccggcgggcgcc

SEQ ID NO: 7928 - DNA, 18 bp, Homo sapiens
ggagccctgggcgcgggg

SEQ ID NO: 7929 - DNA, 21 bp, Homo sapiens
ggagccgagggccattgagtg

SEQ ID NO: 7930 - DNA, 17 bp, Homo sapiens
ggagccgcctgaggagg

SEQ ID NO: 7931 - DNA, 18 bp, Homo sapiens
ggagccgcgacaggagga

SEQ ID NO: 7932 - DNA, 18 bp, Homo sapiens
ggagccggaggaggaagg

SEQ ID NO: 7933 - DNA, 18 bp, Homo sapiens
ggagccggcagcgcaggc

SEQ ID NO: 7934 - DNA, 20 bp, Homo sapiens
ggagccggggagtgggccag

SEQ ID NO: 7935 - DNA, 18 bp, Homo sapiens
ggagccttaggcggagcg

SEQ ID NO: 7936 - DNA, 17 bp, Homo sapiens
ggagcgaagagaaccgg

SEQ ID NO: 7937 - DNA, 18 bp, Homo sapiens
ggagcgacgacacccccg

SEQ ID NO: 7938 - DNA, 16 bp, Homo sapiens
ggagcgaggtggcgag

SEQ ID NO: 7939 - DNA, 23 bp, Homo sapiens
ggagcgcagatcgcggacccgag

SEQ ID NO: 7940 - DNA, 19 bp, Homo sapiens
ggagcgcagctggcgccgc

SEQ ID NO: 7941 - DNA, 21 bp, Homo sapiens
ggagcgccgcacctacaccag

SEQ ID NO: 7942 - DNA, 17 bp, Homo sapiens
ggagcgcgcggatgatg

SEQ ID NO: 7943 - DNA, 19 bp, Homo sapiens
ggagcgcgggccgctgacg

SEQ ID NO: 7944 - DNA, 18 bp, Homo sapiens
ggagcggacccggccggg

SEQ ID NO: 7945 - DNA, 18 bp, Homo sapiens
ggagcggagacggagaac

SEQ ID NO: 7946 - DNA, 19 bp, Homo sapiens
ggagcggagctgtgaggcg

SEQ ID NO: 7947 - DNA, 19 bp, Homo sapiens
ggagcggctgcgggacgtg

SEQ ID NO: 7948 - DNA, 18 bp, Homo sapiens
ggagcgggattgtttcgc

SEQ ID NO: 7949 - DNA, 15 bp, Homo sapiens
ggagcgtgcgtccgt

SEQ ID NO: 7950 - DNA, 17 bp, Homo sapiens
ggagctccagctctgcc

SEQ ID NO: 7951 - DNA, 18 bp, Homo sapiens
ggagctgacggtggaggt

SEQ ID NO: 7952 - DNA, 16 bp, Homo sapiens
ggagctgcctcgcgca

SEQ ID NO: 7953 - DNA, 17 bp, Homo sapiens
ggagctgctctgccgcg

SEQ ID NO: 7954 - DNA, 20 bp, Homo sapiens
ggagctggagacggcctggg

SEQ ID NO: 7955 - DNA, 16 bp, Homo sapiens
ggagcttgcggggcgc

SEQ ID NO: 7956 - DNA, 17 bp, Homo sapiens
ggaggaaatgcggagcc

SEQ ID NO: 7957 - DNA, 18 bp, Homo sapiens
ggaggaaatgcggagccg

SEQ ID NO: 7958 - DNA, 20 bp, Homo sapiens
ggaggaagaggcctcgcgca

SEQ ID NO: 7959 - DNA, 18 bp, Homo sapiens
ggaggaagcacagcagca

SEQ ID NO: 7960 - DNA, 17 bp, Homo sapiens
ggaggaccgaggacaga

SEQ ID NO: 7961 - DNA, 18 bp, Homo sapiens
ggaggacggtggctgacg

SEQ ID NO: 7962 - DNA, 21 bp, Homo sapiens
ggaggactcgttggggaggtg

SEQ ID NO: 7963 - DNA, 17 bp, Homo sapiens
ggaggagacagggctac

SEQ ID NO: 7964 - DNA, 24 bp, Homo sapiens
ggaggagccgcgagcgctgagggt

SEQ ID NO: 7965 - DNA, 19 bp, Homo sapiens
ggaggagcgcgcgggctgc

SEQ ID NO: 7966 - DNA, 18 bp, Homo sapiens
ggaggagcggtgggagcg

SEQ ID NO: 7967 - DNA, 18 bp, Homo sapiens
ggaggagctcgaggctga

SEQ ID NO: 7968 - DNA, 18 bp, Homo sapiens
ggaggaggaagcggtggc

SEQ ID NO: 7969 - DNA, 21 bp, Homo sapiens
ggaggaggaggaggaagaaga

SEQ ID NO: 7970 - DNA, 22 bp, Homo sapiens
ggaggaggcgaattagtccgag

SEQ ID NO: 7971 - DNA, 18 bp, Homo sapiens
ggaggagggaggccgggc

SEQ ID NO: 7972 - DNA, 18 bp, Homo sapiens
ggaggagggtggcggaga

SEQ ID NO: 7973 - DNA, 20 bp, Homo sapiens
ggaggatgctgggaaggagg

SEQ ID NO: 7974 - DNA, 21 bp, Homo sapiens
ggaggcaaggcgggtgcaggg

SEQ ID NO: 7975 - DNA, 18 bp, Homo sapiens
cagcggagttgtgggggc

SEQ ID NO: 7976 - DNA, 18 bp, Homo sapiens
cagcggcaagaagtgtct

SEQ ID NO: 7977 - DNA, 20 bp, Homo sapiens
cagcggccagggtaacgctg

SEQ ID NO: 7978 - DNA, 21 bp, Homo sapiens
cagcggccagggtaacgctgt

SEQ ID NO: 7979 - DNA, 18 bp, Homo sapiens
cagcggcgatggaaccag

SEQ ID NO: 7980 - DNA, 18 bp, Homo sapiens
cagcggcggaggagcgga

SEQ ID NO: 7981 - DNA, 16 bp, Homo sapiens
cagcggcggaggcgac

SEQ ID NO: 7982 - DNA, 21 bp, Homo sapiens
cagcggcggccgcggcggagc

SEQ ID NO: 7983 - DNA, 17 bp, Homo sapiens
cagcgggagaacgataa

SEQ ID NO: 7984 - DNA, 17 bp, Homo sapiens
cagcgggagacgagacg

SEQ ID NO: 7985 - DNA, 18 bp, Homo sapiens
cagcgggagccggccggg

SEQ ID NO: 7986 - DNA, 18 bp, Homo sapiens
cagcgggcgaggtcaaga

SEQ ID NO: 7987 - DNA, 19 bp, Homo sapiens
cagcggggaccccgagcta

SEQ ID NO: 7988 - DNA, 16 bp, Homo sapiens
cagcggggtggacaag

SEQ ID NO: 7989 - DNA, 18 bp, Homo sapiens
cagcgggtgggactggct

SEQ ID NO: 7990 - DNA, 18 bp, Homo sapiens
cagcggtggtggtggcgg

SEQ ID NO: 7991 - DNA, 18 bp, Homo sapiens
cagcgtctggggtttccg

SEQ ID NO: 7992 - DNA, 17 bp, Homo sapiens
cagcgtgaggtgaccca

SEQ ID NO: 7993 - DNA, 18 bp, Homo sapiens
cagcgtgtcctgagtctt

SEQ ID NO: 7994 - DNA, 20 bp, Homo sapiens
cagctagaacagcctggtca

SEQ ID NO: 7995 - DNA, 16 bp, Homo sapiens
cagctcaggatgagga

SEQ ID NO: 7996 - DNA, 24 bp, Homo sapiens
cagctccgcggaagttgcggtaag

SEQ ID NO: 7997 - DNA, 18 bp, Homo sapiens
cagctcggactggtcata

SEQ ID NO: 7998 - DNA, 18 bp, Homo sapiens
cagctctcggatgaggag

SEQ ID NO: 7999 - DNA, 21 bp, Homo sapiens
cagctcttataaactagtggc

SEQ ID NO: 8000 - DNA, 18 bp, Homo sapiens
cagctcttcctgcaacgg

SEQ ID NO: 8001 - DNA, 19 bp, Homo sapiens
cagctgacgctccgcattg

SEQ ID NO: 8002 - DNA, 19 bp, Homo sapiens
cagctgagtgtctcctgat

SEQ ID NO: 8003 - DNA, 19 bp, Homo sapiens
cagctgcaccgccgagctg

SEQ ID NO: 8004 - DNA, 22 bp, Homo sapiens
cagctgcaggaagggggatgtg

SEQ ID NO: 8005 - DNA, 17 bp, Homo sapiens
cagctgcaggtaggggg

SEQ ID NO: 8006 - DNA, 21 bp, Homo sapiens
cagctgcagtaagttccagcg

SEQ ID NO: 8007 - DNA, 18 bp, Homo sapiens
cagctgcatccggatctc

SEQ ID NO: 8008 - DNA, 19 bp, Homo sapiens
cagctgccgggcggtcctg

SEQ ID NO: 8009 - DNA, 18 bp, Homo sapiens
cagctgccgttaggcgct

SEQ ID NO: 8010 - DNA, 20 bp, Homo sapiens
cagctgcctgaaccgagccc

SEQ ID NO: 8011 - DNA, 18 bp, Homo sapiens
cagctgcggcgggacccg

SEQ ID NO: 8012 - DNA, 20 bp, Homo sapiens
cagctgcttcaagatgaagg

SEQ ID NO: 8013 - DNA, 19 bp, Homo sapiens
cagctggacttggaaaagc

SEQ ID NO: 8014 - DNA, 18 bp, Homo sapiens
cagctggcagtagttccg

SEQ ID NO: 8015 - DNA, 18 bp, Homo sapiens
cagctggcggcattgagg

SEQ ID NO: 8016 - DNA, 16 bp, Homo sapiens
cagctggcggtgctcg

SEQ ID NO: 8017 - DNA, 19 bp, Homo sapiens
cagctggctggcggctgcc

SEQ ID NO: 8018 - DNA, 17 bp, Homo sapiens
cagctgggagcgcctgg

SEQ ID NO: 8019 - DNA, 19 bp, Homo sapiens
cagctgggagcgcctggca

SEQ ID NO: 8020 - DNA, 23 bp, Homo sapiens
cagctggggccggtggctccgga

SEQ ID NO: 8021 - DNA, 20 bp, Homo sapiens
cagctgtcagctccattttg

SEQ ID NO: 8022 - DNA, 18 bp, Homo sapiens
cagctgtctttcagaaga

SEQ ID NO: 8023 - DNA, 18 bp, Homo sapiens
cagctgtggcggcctggg

SEQ ID NO: 8024 - DNA, 18 bp, Homo sapiens
cagcttcaggacgctgtg

SEQ ID NO: 8025 - DNA, 18 bp, Homo sapiens
cagcttcccaccctgggc

SEQ ID NO: 8026 - DNA, 18 bp, Homo sapiens
cagcttccgcggagccat

SEQ ID NO: 8027 - DNA, 18 bp, Homo sapiens
cagcttggagatagggcc

SEQ ID NO: 8028 - DNA, 20 bp, Homo sapiens
cagcttggtagggattgggg

SEQ ID NO: 8029 - DNA, 20 bp, Homo sapiens
caggaaactggctagaagac

SEQ ID NO: 8030 - DNA, 18 bp, Homo sapiens
caggaaatttggaagctg

SEQ ID NO: 8031 - DNA, 18 bp, Homo sapiens
caggaacggacaggacat

SEQ ID NO: 8032 - DNA, 22 bp, Homo sapiens
ggaggccctgaggagggcccac

SEQ ID NO: 8033 - DNA, 17 bp, Homo sapiens
ggaggcgctgagtcgag

SEQ ID NO: 8034 - DNA, 21 bp, Homo sapiens
ggaggcggcggcggccgcagc

SEQ ID NO: 8035 - DNA, 18 bp, Homo sapiens
ggaggcggcggtggccag

SEQ ID NO: 8036 - DNA, 18 bp, Homo sapiens
ggaggcggcgtggaaggc

SEQ ID NO: 8037 - DNA, 19 bp, Homo sapiens
ggaggcggctagaaggtga

SEQ ID NO: 8038 - DNA, 19 bp, Homo sapiens
ggaggcgggctgcggctgc

SEQ ID NO: 8039 - DNA, 22 bp, Homo sapiens
ggaggcggggaggccggagctg

SEQ ID NO: 8040 - DNA, 21 bp, Homo sapiens
ggaggcggtgcggagcatttc

SEQ ID NO: 8041 - DNA, 17 bp, Homo sapiens
ggaggcgtgggctggga

SEQ ID NO: 8042 - DNA, 18 bp, Homo sapiens
ggaggctggaggtactga

SEQ ID NO: 8043 - DNA, 19 bp, Homo sapiens
ggagggaagcaggaagtga

SEQ ID NO: 8044 - DNA, 18 bp, Homo sapiens
ggagggagccccgaccgt

SEQ ID NO: 8045 - DNA, 20 bp, Homo sapiens
ggagggagccgtggaggtcc

SEQ ID NO: 8046 - DNA, 18 bp, Homo sapiens
ggagggaggacagtttcg

SEQ ID NO: 8047 - DNA, 17 bp, Homo sapiens
ggagggagttggggccg

SEQ ID NO: 8048 - DNA, 22 bp, Homo sapiens
ggagggcaggagctggggccac

SEQ ID NO: 8049 - DNA, 20 bp, Homo sapiens
ggagggccgagccgggtgcg

SEQ ID NO: 8050 - DNA, 16 bp, Homo sapiens
ggagggcctagggcgg

SEQ ID NO: 8051 - DNA, 19 bp, Homo sapiens
ggagggcgcccggagtcga

SEQ ID NO: 8052 - DNA, 18 bp, Homo sapiens
ggagggcgctccaggcga

SEQ ID NO: 8053 - DNA, 18 bp, Homo sapiens
ggaggggcttggagtgag

SEQ ID NO: 8054 - DNA, 18 bp, Homo sapiens
ggaggggtgggtgtcgca

SEQ ID NO: 8055 - DNA, 20 bp, Homo sapiens
ggaggggttggcggggcagc

SEQ ID NO: 8056 - DNA, 18 bp, Homo sapiens
ggagggtggcagggaggg

SEQ ID NO: 8057 - DNA, 18 bp, Homo sapiens
ggagggttctagaaggcg

SEQ ID NO: 8058 - DNA, 18 bp, Homo sapiens
ggaggtagcaagatggcc

SEQ ID NO: 8059 - DNA, 20 bp, Homo sapiens
ggaggtgagagtccccagcg

SEQ ID NO: 8060 - DNA, 17 bp, Homo sapiens
ggaggtgagcagggaaa

SEQ ID NO: 8061 - DNA, 16 bp, Homo sapiens
ggaggtgcgcgggcgc

SEQ ID NO: 8062 - DNA, 20 bp, Homo sapiens
ggaggtgcgcgggcgcgggc

SEQ ID NO: 8063 - DNA, 16 bp, Homo sapiens
ggaggtgcgctgaacg

SEQ ID NO: 8064 - DNA, 18 bp, Homo sapiens
ggaggtggaggcaccggc

SEQ ID NO: 8065 - DNA, 16 bp, Homo sapiens
ggaggtggcgaaacga

SEQ ID NO: 8066 - DNA, 16 bp, Homo sapiens
ggaggtgggtcctggg

SEQ ID NO: 8067 - DNA, 18 bp, Homo sapiens
ggaggtggtggcgttcgc

SEQ ID NO: 8068 - DNA, 21 bp, Homo sapiens
ggaggtgttttagcggggact

SEQ ID NO: 8069 - DNA, 16 bp, Homo sapiens
ggaggtttcggagcac

SEQ ID NO: 8070 - DNA, 18 bp, Homo sapiens
ggaggtttcggagcacta

SEQ ID NO: 8071 - DNA, 16 bp, Homo sapiens
ggaggtttgagtttga

SEQ ID NO: 8072 - DNA, 18 bp, Homo sapiens
ggagtaaacagccccgaa

SEQ ID NO: 8073 - DNA, 18 bp, Homo sapiens
ggagtaagaggaaaacga

SEQ ID NO: 8074 - DNA, 17 bp, Homo sapiens
ggagtagcgagtcggca

SEQ ID NO: 8075 - DNA, 17 bp, Homo sapiens
ggagtcatggcggatgg

SEQ ID NO: 8076 - DNA, 21 bp, Homo sapiens
ggagtccgtcagttgctccgc

SEQ ID NO: 8077 - DNA, 18 bp, Homo sapiens
ggagtcggaggcgatatt

SEQ ID NO: 8078 - DNA, 18 bp, Homo sapiens
ggagtgaattgatccggg

SEQ ID NO: 8079 - DNA, 17 bp, Homo sapiens
ggagtggcgtagacgag

SEQ ID NO: 8080 - DNA, 18 bp, Homo sapiens
ggagtgtcgtggacgccg

SEQ ID NO: 8081 - DNA, 23 bp, Homo sapiens
ggagtgtgtgcgccgggagctgg

SEQ ID NO: 8082 - DNA, 22 bp, Homo sapiens
ggagttaagcgccccggcagta

SEQ ID NO: 8083 - DNA, 19 bp, Homo sapiens
ggagttacagccgcgtttg

SEQ ID NO: 8084 - DNA, 19 bp, Homo sapiens
ggagttagtgcaggtcctg

SEQ ID NO: 8085 - DNA, 16 bp, Homo sapiens
ggatacgctggagtcc

SEQ ID NO: 8086 - DNA, 20 bp, Homo sapiens
ggatatcgggtggcggctcg

SEQ ID NO: 8087 - DNA, 18 bp, Homo sapiens
ggatcagctgacgctccg

SEQ ID NO: 8088 - DNA, 16 bp, Homo sapiens
ggatccggtagccgag

SEQ ID NO: 8089 - DNA, 18 bp, Homo sapiens
caggaagagccggcgcca

SEQ ID NO: 8090 - DNA, 17 bp, Homo sapiens
caggaagatggcgaacg

SEQ ID NO: 8091 - DNA, 15 bp, Homo sapiens
caggaagattgtgca

SEQ ID NO: 8092 - DNA, 18 bp, Homo sapiens
caggaagcgcgggctcgg

SEQ ID NO: 8093 - DNA, 18 bp, Homo sapiens
caggaagcttaattgaaa

SEQ ID NO: 8094 - DNA, 19 bp, Homo sapiens
caggaagtgaactgagggc

SEQ ID NO: 8095 - DNA, 18 bp, Homo sapiens
caggaagtgggaccggtg

SEQ ID NO: 8096 - DNA, 19 bp, Homo sapiens
caggacaaggatagcggaa

SEQ ID NO: 8097 - DNA, 18 bp, Homo sapiens
caggacacggaggaccgg

SEQ ID NO: 8098 - DNA, 17 bp, Homo sapiens
caggacccaaacaaccg

SEQ ID NO: 8099 - DNA, 18 bp, Homo sapiens
caggaccgagcaggggag

SEQ ID NO: 8100 - DNA, 19 bp, Homo sapiens
caggacctagacgcgcggc

SEQ ID NO: 8101 - DNA, 20 bp, Homo sapiens
caggacctggccaggaagcg

SEQ ID NO: 8102 - DNA, 18 bp, Homo sapiens
caggaccttggggctggg

SEQ ID NO: 8103 - DNA, 16 bp, Homo sapiens
caggacgagtccccac

SEQ ID NO: 8104 - DNA, 19 bp, Homo sapiens
caggacgcggcaaaggagg

SEQ ID NO: 8105 - DNA, 18 bp, Homo sapiens
caggacgtgcactatggc

SEQ ID NO: 8106 - DNA, 18 bp, Homo sapiens
caggactggcgcagctgc

SEQ ID NO: 8107 - DNA, 18 bp, Homo sapiens
caggactgggctaaccgg

SEQ ID NO: 8108 - DNA, 18 bp, Homo sapiens
caggagaagcggagctct

SEQ ID NO: 8109 - DNA, 21 bp, Homo sapiens
caggagacccggggacagcat

SEQ ID NO: 8110 - DNA, 17 bp, Homo sapiens
caggagacgcgtagccg

SEQ ID NO: 8111 - DNA, 18 bp, Homo sapiens
caggagacgcgtagccgc

SEQ ID NO: 8112 - DNA, 17 bp, Homo sapiens
caggagacggacagtgt

SEQ ID NO: 8113 - DNA, 18 bp, Homo sapiens
caggagaggaaggtaggg

SEQ ID NO: 8114 - DNA, 21 bp, Homo sapiens
caggagcaagacctctgagcc

SEQ ID NO: 8115 - DNA, 18 bp, Homo sapiens
caggagccgcggagccgg

SEQ ID NO: 8116 - DNA, 19 bp, Homo sapiens
caggagcgcggaacatggc

SEQ ID NO: 8117 - DNA, 20 bp, Homo sapiens
caggagcgggccaggagctg

SEQ ID NO: 8118 - DNA, 20 bp, Homo sapiens
caggagcggtgagatcactg

SEQ ID NO: 8119 - DNA, 17 bp, Homo sapiens
caggagcgtagagagcg

SEQ ID NO: 8120 - DNA, 22 bp, Homo sapiens
caggaggagagagaaacgcagg

SEQ ID NO: 8121 - DNA, 18 bp, Homo sapiens
caggaggcgggcggcccg

SEQ ID NO: 8122 - DNA, 21 bp, Homo sapiens
caggaggctgatgaaggtaaa

SEQ ID NO: 8123 - DNA, 18 bp, Homo sapiens
caggagtcatcggacgcc

SEQ ID NO: 8124 - DNA, 20 bp, Homo sapiens
caggagtcatgagcgacagc

SEQ ID NO: 8125 - DNA, 18 bp, Homo sapiens
caggagttaagctgaggt

SEQ ID NO: 8126 - DNA, 19 bp, Homo sapiens
caggataccgaggcaccgg

SEQ ID NO: 8127 - DNA, 17 bp, Homo sapiens
caggatgaaggtgacgg

SEQ ID NO: 8128 - DNA, 17 bp, Homo sapiens
caggatggacgaggacg

SEQ ID NO: 8129 - DNA, 19 bp, Homo sapiens
caggatggtgagtggatgc

SEQ ID NO: 8130 - DNA, 17 bp, Homo sapiens
caggattagacagaaga

SEQ ID NO: 8131 - DNA, 20 bp, Homo sapiens
caggattggccctggaacag

SEQ ID NO: 8132 - DNA, 18 bp, Homo sapiens
caggcaagtctagctcgg

SEQ ID NO: 8133 - DNA, 19 bp, Homo sapiens
caggcaagtctagctcggc

SEQ ID NO: 8134 - DNA, 19 bp, Homo sapiens
caggcagacggacaggctg

SEQ ID NO: 8135 - DNA, 17 bp, Homo sapiens
caggcagtagaggccgc

SEQ ID NO: 8136 - DNA, 15 bp, Homo sapiens
caggccactggtccg

SEQ ID NO: 8137 - DNA, 18 bp, Homo sapiens
caggccagcctcggagcc

SEQ ID NO: 8138 - DNA, 18 bp, Homo sapiens
caggccagtgcagggccg

SEQ ID NO: 8139 - DNA, 20 bp, Homo sapiens
caggccatggcttccggttc

SEQ ID NO: 8140 - DNA, 23 bp, Homo sapiens
caggccctgcgcccccgcggctg

SEQ ID NO: 8141 - DNA, 17 bp, Homo sapiens
caggccgggcaggtacg

SEQ ID NO: 8142 - DNA, 18 bp, Homo sapiens
caggcctggcggtaacct

SEQ ID NO: 8143 - DNA, 24 bp, Homo sapiens
caggcgcggcgtttgaagaaaaac

SEQ ID NO: 8144 - DNA, 14 bp, Homo sapiens
caggcgcggtcgcc

SEQ ID NO: 8145 - DNA, 16 bp, Homo sapiens
caggcggacggcggtg

SEQ ID NO: 8146 - DNA, 17 bp, Homo sapiens
ggatcgggccccgggcg

SEQ ID NO: 8147 - DNA, 18 bp, Homo sapiens
ggatctgggaagcgcctc

SEQ ID NO: 8148 - DNA, 16 bp, Homo sapiens
ggatcttttttcggga

SEQ ID NO: 8149 - DNA, 18 bp, Homo sapiens
ggatgaaccccacagatc

SEQ ID NO: 8150 - DNA, 19 bp, Homo sapiens
ggatgaacgcggccctctg

SEQ ID NO: 8151 - DNA, 18 bp, Homo sapiens
ggatgaggatggggacgg

SEQ ID NO: 8152 - DNA, 20 bp, Homo sapiens
ggatgcggtcgaagacgaga

SEQ ID NO: 8153 - DNA, 18 bp, Homo sapiens
ggatggacgaggacgtgc

SEQ ID NO: 8154 - DNA, 18 bp, Homo sapiens
ggatgggtgcagttcagg

SEQ ID NO: 8155 - DNA, 16 bp, Homo sapiens
ggatgtcggcgaagag

SEQ ID NO: 8156 - DNA, 17 bp, Homo sapiens
ggatgtgaggggcgccg

SEQ ID NO: 8157 - DNA, 18 bp, Homo sapiens
ggattccgagcgttggtg

SEQ ID NO: 8158 - DNA, 18 bp, Homo sapiens
ggattccgggtgctggtt

SEQ ID NO: 8159 - DNA, 21 bp, Homo sapiens
ggattggcgtccgggcggcta

SEQ ID NO: 8160 - DNA, 16 bp, Homo sapiens
ggattggggtggcccg

SEQ ID NO: 8161 - DNA, 23 bp, Homo sapiens
ggcaaaggcggaaagggactggg

SEQ ID NO: 8162 - DNA, 17 bp, Homo sapiens
ggcaacgtcgacggggc

SEQ ID NO: 8163 - DNA, 18 bp, Homo sapiens
ggcaacttctcctcctgc

SEQ ID NO: 8164 - DNA, 18 bp, Homo sapiens
ggcaagagggcaaagaag

SEQ ID NO: 8165 - DNA, 17 bp, Homo sapiens
ggcaagatggcgtccct

SEQ ID NO: 8166 - DNA, 16 bp, Homo sapiens
ggcaagtttttggctc

SEQ ID NO: 8167 - DNA, 19 bp, Homo sapiens
ggcacaaggcacaacaggc

SEQ ID NO: 8168 - DNA, 21 bp, Homo sapiens
ggcacagacccggaagcggat

SEQ ID NO: 8169 - DNA, 17 bp, Homo sapiens
ggcacagcggctgagac

SEQ ID NO: 8170 - DNA, 19 bp, Homo sapiens
ggcacatgtttccgcggag

SEQ ID NO: 8171 - DNA, 18 bp, Homo sapiens
ggcacccaagccagctgc

SEQ ID NO: 8172 - DNA, 18 bp, Homo sapiens
ggcaccggctggcgggcg

SEQ ID NO: 8173 - DNA, 19 bp, Homo sapiens
ggcacctcattcatttcta

SEQ ID NO: 8174 - DNA, 21 bp, Homo sapiens
ggcacctcattcatttctacc

SEQ ID NO: 8175 - DNA, 19 bp, Homo sapiens
ggcacgagcatcgggtagg

SEQ ID NO: 8176 - DNA, 19 bp, Homo sapiens
ggcacgtcgtgacgcactg

SEQ ID NO: 8177 - DNA, 18 bp, Homo sapiens
ggcacgttactccgtccg

SEQ ID NO: 8178 - DNA, 19 bp, Homo sapiens
ggcacgttactccgtccga

SEQ ID NO: 8179 - DNA, 18 bp, Homo sapiens
ggcactgggaagcgccat

SEQ ID NO: 8180 - DNA, 18 bp, Homo sapiens
ggcactgtaaatggcggc

SEQ ID NO: 8181 - DNA, 18 bp, Homo sapiens
ggcagagagagtcgggtt

SEQ ID NO: 8182 - DNA, 18 bp, Homo sapiens
ggcagagctcgccactcc

SEQ ID NO: 8183 - DNA, 18 bp, Homo sapiens
ggcagagctgccgccatt

SEQ ID NO: 8184 - DNA, 19 bp, Homo sapiens
ggcagagctgccgccattt

SEQ ID NO: 8185 - DNA, 17 bp, Homo sapiens
ggcagagcttgagggca

SEQ ID NO: 8186 - DNA, 20 bp, Homo sapiens
ggcagcagcagcagcagcag

SEQ ID NO: 8187 - DNA, 16 bp, Homo sapiens
ggcagcagcagcagcg

SEQ ID NO: 8188 - DNA, 19 bp, Homo sapiens
ggcagccgcgcaagcgcaa

SEQ ID NO: 8189 - DNA, 18 bp, Homo sapiens
ggcagcctgaacggagtg

SEQ ID NO: 8190 - DNA, 18 bp, Homo sapiens
ggcagcgcggtcagtggc

SEQ ID NO: 8191 - DNA, 18 bp, Homo sapiens
ggcagcgctcattcggcc

SEQ ID NO: 8192 - DNA, 18 bp, Homo sapiens
ggcagcggagacagaggc

SEQ ID NO: 8193 - DNA, 18 bp, Homo sapiens
ggcagcggcaaggcagcc

SEQ ID NO: 8194 - DNA, 17 bp, Homo sapiens
ggcagcggcggtggcgg

SEQ ID NO: 8195 - DNA, 16 bp, Homo sapiens
ggcagcgttgggccca

SEQ ID NO: 8196 - DNA, 17 bp, Homo sapiens
ggcagcgttgttctctg

SEQ ID NO: 8197 - DNA, 18 bp, Homo sapiens
ggcagctcggactggtca

SEQ ID NO: 8198 - DNA, 17 bp, Homo sapiens
ggcaggaaaatgagctt

SEQ ID NO: 8199 - DNA, 18 bp, Homo sapiens
ggcaggacaggcagacgg

SEQ ID NO: 8200 - DNA, 17 bp, Homo sapiens
ggcaggctgcggaaggg

SEQ ID NO: 8201 - DNA, 18 bp, Homo sapiens
ggcagggcccggggagaa

SEQ ID NO: 8202 - DNA, 20 bp, Homo sapiens
ggcagggccgaggggcctgc

SEQ ID NO: 8203 - DNA, 22 bp, Homo sapiens
caggcggaggaggagaaggagg

SEQ ID NO: 8204 - DNA, 18 bp, Homo sapiens
caggcggaggatgtattg

SEQ ID NO: 8205 - DNA, 20 bp, Homo sapiens
caggcggaggctgagggcgc

SEQ ID NO: 8206 - DNA, 23 bp, Homo sapiens
caggcggagggatccgccgctcc

SEQ ID NO: 8207 - DNA, 20 bp, Homo sapiens
caggcggcggtggaaaggtg

SEQ ID NO: 8208 - DNA, 21 bp, Homo sapiens
caggctcctgcaggcagtttg

SEQ ID NO: 8209 - DNA, 18 bp, Homo sapiens
caggctgagacgagacgc

SEQ ID NO: 8210 - DNA, 20 bp, Homo sapiens
caggctgcggagcggacgga

SEQ ID NO: 8211 - DNA, 17 bp, Homo sapiens
caggctgcgggacgcgg

SEQ ID NO: 8212 - DNA, 16 bp, Homo sapiens
caggctgctccaagtg

SEQ ID NO: 8213 - DNA, 18 bp, Homo sapiens
caggctggagctaggcga

SEQ ID NO: 8214 - DNA, 18 bp, Homo sapiens
caggctggcaggtggaca

SEQ ID NO: 8215 - DNA, 21 bp, Homo sapiens
caggctgggccgactgagggg

SEQ ID NO: 8216 - DNA, 19 bp, Homo sapiens
caggctggtctcggaaacg

SEQ ID NO: 8217 - DNA, 19 bp, Homo sapiens
caggctgtgccatcccgcc

SEQ ID NO: 8218 - DNA, 18 bp, Homo sapiens
caggctgtggacgtggcc

SEQ ID NO: 8219 - DNA, 19 bp, Homo sapiens
cagggaaaaagcaacaaga

SEQ ID NO: 8220 - DNA, 19 bp, Homo sapiens
cagggacaaccacaaccac

SEQ ID NO: 8221 - DNA, 19 bp, Homo sapiens
cagggacaagaaacagggg

SEQ ID NO: 8222 - DNA, 20 bp, Homo sapiens
cagggacaagaaacaggggg

SEQ ID NO: 8223 - DNA, 17 bp, Homo sapiens
cagggacggggtctccg

SEQ ID NO: 8224 - DNA, 20 bp, Homo sapiens
cagggagcggagacggagga

SEQ ID NO: 8225 - DNA, 19 bp, Homo sapiens
cagggagggagccgctgga

SEQ ID NO: 8226 - DNA, 17 bp, Homo sapiens
cagggaggggggacgat

SEQ ID NO: 8227 - DNA, 20 bp, Homo sapiens
cagggatgaaccgggccttc

SEQ ID NO: 8228 - DNA, 18 bp, Homo sapiens
cagggcagagcgcgggta

SEQ ID NO: 8229 - DNA, 20 bp, Homo sapiens
cagggccacgtctgcggttc

SEQ ID NO: 8230 - DNA, 17 bp, Homo sapiens
cagggccatggcggagg

SEQ ID NO: 8231 - DNA, 22 bp, Homo sapiens
cagggcgagctctcctccgccc

SEQ ID NO: 8232 - DNA, 18 bp, Homo sapiens
cagggctgagccatcccg

SEQ ID NO: 8233 - DNA, 21 bp, Homo sapiens
cagggctgctgtggagttcgc

SEQ ID NO: 8234 - DNA, 18 bp, Homo sapiens
cagggctgcttttctcgc

SEQ ID NO: 8235 - DNA, 20 bp, Homo sapiens
cagggctgggcagtgctgcc

SEQ ID NO: 8236 - DNA, 21 bp, Homo sapiens
cagggctgggcctgcgactac

SEQ ID NO: 8237 - DNA, 21 bp, Homo sapiens
cagggctggtctggaggcgcg

SEQ ID NO: 8238 - DNA, 18 bp, Homo sapiens
cagggctgtgtaggggcg

SEQ ID NO: 8239 - DNA, 18 bp, Homo sapiens
caggggaagcggctgcct

SEQ ID NO: 8240 - DNA, 16 bp, Homo sapiens
caggggaaggggaacg

SEQ ID NO: 8241 - DNA, 18 bp, Homo sapiens
caggggaaggggaacgtg

SEQ ID NO: 8242 - DNA, 17 bp, Homo sapiens
caggggcagctggcggg

SEQ ID NO: 8243 - DNA, 19 bp, Homo sapiens
caggggccacttttcgaga

SEQ ID NO: 8244 - DNA, 18 bp, Homo sapiens
caggggctattgcaaagc

SEQ ID NO: 8245 - DNA, 21 bp, Homo sapiens
caggggtagaagaaggaagtg

SEQ ID NO: 8246 - DNA, 20 bp, Homo sapiens
caggggtctgcgggcgactg

SEQ ID NO: 8247 - DNA, 22 bp, Homo sapiens
caggggtctgcgggcgactgcg

SEQ ID NO: 8248 - DNA, 18 bp, Homo sapiens
cagggtaaggctgcggag

SEQ ID NO: 8249 - DNA, 23 bp, Homo sapiens
cagggtagctgttggcgccgccg

SEQ ID NO: 8250 - DNA, 24 bp, Homo sapiens
cagggtcgcggcggcagtcggcaa

SEQ ID NO: 8251 - DNA, 19 bp, Homo sapiens
cagggtctggggaagcggc

SEQ ID NO: 8252 - DNA, 18 bp, Homo sapiens
cagggtgagcgtggaaga

SEQ ID NO: 8253 - DNA, 19 bp, Homo sapiens
caggtaaggggagtgggac

SEQ ID NO: 8254 - DNA, 17 bp, Homo sapiens
caggtacacggaggctg

SEQ ID NO: 8255 - DNA, 17 bp, Homo sapiens
caggtccatccggcgat

SEQ ID NO: 8256 - DNA, 17 bp, Homo sapiens
caggtcgggcaggcggg

SEQ ID NO: 8257 - DNA, 18 bp, Homo sapiens
caggtctctctgtcgggg

SEQ ID NO: 8258 - DNA, 18 bp, Homo sapiens
caggtctgggaggcagtt

SEQ ID NO: 8259 - DNA, 19 bp, Homo sapiens
caggtctgggaggcagttc

SEQ ID NO: 8260 - DNA, 20 bp, Homo sapiens
ggcagggccggctgttaatc

SEQ ID NO: 8261 - DNA, 18 bp, Homo sapiens
ggcagggcctgtgtgtgc

SEQ ID NO: 8262 - DNA, 18 bp, Homo sapiens
ggcagggggaggcgcgca

SEQ ID NO: 8263 - DNA, 18 bp, Homo sapiens
ggcagtcgacacgctctt

SEQ ID NO: 8264 - DNA, 17 bp, Homo sapiens
ggcagtctctgcatatc

SEQ ID NO: 8265 - DNA, 19 bp, Homo sapiens
ggcagttgaggaggaggga

SEQ ID NO: 8266 - DNA, 17 bp, Homo sapiens
ggcatcgctggacgctt

SEQ ID NO: 8267 - DNA, 16 bp, Homo sapiens
ggccactagcgcggcg

SEQ ID NO: 8268 - DNA, 17 bp, Homo sapiens
ggccactcggagctgct

SEQ ID NO: 8269 - DNA, 18 bp, Homo sapiens
ggccacttccagctcccg

SEQ ID NO: 8270 - DNA, 17 bp, Homo sapiens
ggccagcgtcggcgcag

SEQ ID NO: 8271 - DNA, 21 bp, Homo sapiens
ggccagggcggcggcccccag

SEQ ID NO: 8272 - DNA, 18 bp, Homo sapiens
ggccatggccggcctgtc

SEQ ID NO: 8273 - DNA, 17 bp, Homo sapiens
ggcccaagcggtttcaa

SEQ ID NO: 8274 - DNA, 20 bp, Homo sapiens
ggcccaagcttgggctttgc

SEQ ID NO: 8275 - DNA, 15 bp, Homo sapiens
ggcccagcccccggt

SEQ ID NO: 8276 - DNA, 16 bp, Homo sapiens
ggcccagcgggagtcg

SEQ ID NO: 8277 - DNA, 20 bp, Homo sapiens
ggcccagggcaggcggggcc

SEQ ID NO: 8278 - DNA, 24 bp, Homo sapiens
ggcccatgtggggaggagtcggag

SEQ ID NO: 8279 - DNA, 16 bp, Homo sapiens
ggccccctcccgcagc

SEQ ID NO: 8280 - DNA, 17 bp, Homo sapiens
ggccccgcccaaggccg

SEQ ID NO: 8281 - DNA, 18 bp, Homo sapiens
ggccccgccgaggtgagc

SEQ ID NO: 8282 - DNA, 17 bp, Homo sapiens
ggccccggacgaaggta

SEQ ID NO: 8283 - DNA, 20 bp, Homo sapiens
ggccccggctctcggttata

SEQ ID NO: 8284 - DNA, 17 bp, Homo sapiens
ggcccctccggaaatcc

SEQ ID NO: 8285 - DNA, 18 bp, Homo sapiens
ggcccctcgcgcgggcgc

SEQ ID NO: 8286 - DNA, 20 bp, Homo sapiens
ggcccgaatggcggccgaca

SEQ ID NO: 8287 - DNA, 18 bp, Homo sapiens
ggcccgagaactgacaga

SEQ ID NO: 8288 - DNA, 23 bp, Homo sapiens
ggcccgaggcggaagtgggacgg

SEQ ID NO: 8289 - DNA, 18 bp, Homo sapiens
ggcccgagtcgggaaaat

SEQ ID NO: 8290 - DNA, 16 bp, Homo sapiens
ggcccggaaggcggag

SEQ ID NO: 8291 - DNA, 20 bp, Homo sapiens
ggcccggagcaccgagctcg

SEQ ID NO: 8292 - DNA, 19 bp, Homo sapiens
ggcccgggcggtcgctgcg

SEQ ID NO: 8293 - DNA, 17 bp, Homo sapiens
ggcccggtgtttgggac

SEQ ID NO: 8294 - DNA, 18 bp, Homo sapiens
ggcccgtcggacagccac

SEQ ID NO: 8295 - DNA, 15 bp, Homo sapiens
ggccctgggcagcgc

SEQ ID NO: 8296 - DNA, 17 bp, Homo sapiens
ggcccttcttgtgtatc

SEQ ID NO: 8297 - DNA, 18 bp, Homo sapiens
ggccgaagagcttgtgtg

SEQ ID NO: 8298 - DNA, 21 bp, Homo sapiens
ggccgaccggcctctaccggc

SEQ ID NO: 8299 - DNA, 18 bp, Homo sapiens
ggccgacgccagccagag

SEQ ID NO: 8300 - DNA, 19 bp, Homo sapiens
ggccgactggtgtttatcc

SEQ ID NO: 8301 - DNA, 18 bp, Homo sapiens
ggccgactgtgtagtccg

SEQ ID NO: 8302 - DNA, 17 bp, Homo sapiens
ggccgagaccggcgggg

SEQ ID NO: 8303 - DNA, 22 bp, Homo sapiens
ggccgagaggtgctcggcttgt

SEQ ID NO: 8304 - DNA, 18 bp, Homo sapiens
ggccgagcccggaggcca

SEQ ID NO: 8305 - DNA, 18 bp, Homo sapiens
ggccgagggtaacatccc

SEQ ID NO: 8306 - DNA, 19 bp, Homo sapiens
ggccgccagtcgcggcgat

SEQ ID NO: 8307 - DNA, 16 bp, Homo sapiens
ggccgccatttcaggg

SEQ ID NO: 8308 - DNA, 20 bp, Homo sapiens
ggccgccattttgtgcagtc

SEQ ID NO: 8309 - DNA, 21 bp, Homo sapiens
ggccgccattttgtgcagtcg

SEQ ID NO: 8310 - DNA, 18 bp, Homo sapiens
ggccgccgcagcctctgt

SEQ ID NO: 8311 - DNA, 21 bp, Homo sapiens
ggccgccgcggagggcgcccg

SEQ ID NO: 8312 - DNA, 18 bp, Homo sapiens
ggccgccgctgctgcccc

SEQ ID NO: 8313 - DNA, 23 bp, Homo sapiens
ggccgccggcggccgaggcgatg

SEQ ID NO: 8314 - DNA, 17 bp, Homo sapiens
ggccgcctctcccttcc

SEQ ID NO: 8315 - DNA, 16 bp, Homo sapiens
ggccgcctgggccgcg

SEQ ID NO: 8316 - DNA, 18 bp, Homo sapiens
ggccgcggccgccgctga

SEQ ID NO: 8317 - DNA, 18 bp, Homo sapiens
caggtgaagagtaggcgg

SEQ ID NO: 8318 - DNA, 18 bp, Homo sapiens
caggtgagagttgcgttg

SEQ ID NO: 8319 - DNA, 18 bp, Homo sapiens
caggtgagcggcgaccgg

SEQ ID NO: 8320 - DNA, 19 bp, Homo sapiens
caggttagggagggggcga

SEQ ID NO: 8321 - DNA, 19 bp, Homo sapiens
caggttctcttacatcgac

SEQ ID NO: 8322 - DNA, 19 bp, Homo sapiens
caggtttcgggcggcgaat

SEQ ID NO: 8323 - DNA, 19 bp, Homo sapiens
cagtaaccgctacccagga

SEQ ID NO: 8324 - DNA, 18 bp, Homo sapiens
cagtacccctgcagccgg

SEQ ID NO: 8325 - DNA, 22 bp, Homo sapiens
cagtacgcggggacccggctgc

SEQ ID NO: 8326 - DNA, 19 bp, Homo sapiens
cagtagacggacagaggag

SEQ ID NO: 8327 - DNA, 18 bp, Homo sapiens
cagtagagcctggcggtg

SEQ ID NO: 8328 - DNA, 17 bp, Homo sapiens
cagtagccgcctgctag

SEQ ID NO: 8329 - DNA, 23 bp, Homo sapiens
cagtaggatcggccagtggcgac

SEQ ID NO: 8330 - DNA, 19 bp, Homo sapiens
cagtagtgggctgggccgg

SEQ ID NO: 8331 - DNA, 20 bp, Homo sapiens
cagtagtgggctgggccggg

SEQ ID NO: 8332 - DNA, 23 bp, Homo sapiens
cagtatggtctaggaggcattga

SEQ ID NO: 8333 - DNA, 19 bp, Homo sapiens
cagtcaagatggtggggcc

SEQ ID NO: 8334 - DNA, 20 bp, Homo sapiens
cagtcaagatggtggggccc

SEQ ID NO: 8335 - DNA, 20 bp, Homo sapiens
cagtcagcttgccgccggcg

SEQ ID NO: 8336 - DNA, 18 bp, Homo sapiens
cagtcaggccgcagcccc

SEQ ID NO: 8337 - DNA, 19 bp, Homo sapiens
cagtcagtccggaggctgc

SEQ ID NO: 8338 - DNA, 18 bp, Homo sapiens
cagtcagtccggtgtttg

SEQ ID NO: 8339 - DNA, 18 bp, Homo sapiens
cagtcagtggccaactcc

SEQ ID NO: 8340 - DNA, 17 bp, Homo sapiens
cagtccggaggtgaggc

SEQ ID NO: 8341 - DNA, 18 bp, Homo sapiens
cagtcctgggttgtaccc

SEQ ID NO: 8342 - DNA, 18 bp, Homo sapiens
cagtcgagctttggctaa

SEQ ID NO: 8343 - DNA, 18 bp, Homo sapiens
cagtcgagggctagcgag

SEQ ID NO: 8344 - DNA, 18 bp, Homo sapiens
cagtcgcgagcgaacgac

SEQ ID NO: 8345 - DNA, 20 bp, Homo sapiens
cagtcgcgcagctgtgttcg

SEQ ID NO: 8346 - DNA, 18 bp, Homo sapiens
cagtcggcaaggagagac

SEQ ID NO: 8347 - DNA, 19 bp, Homo sapiens
cagtcggcgacgcctcaga

SEQ ID NO: 8348 - DNA, 16 bp, Homo sapiens
cagtcgggcgcaggcg

SEQ ID NO: 8349 - DNA, 18 bp, Homo sapiens
cagtcgggtgggaagccg

SEQ ID NO: 8350 - DNA, 19 bp, Homo sapiens
cagtcgtaggcgctggccg

SEQ ID NO: 8351 - DNA, 20 bp, Homo sapiens
cagtctccacccggactacg

SEQ ID NO: 8352 - DNA, 20 bp, Homo sapiens
cagtctctgagcagccattg

SEQ ID NO: 8353 - DNA, 16 bp, Homo sapiens
cagtctctgcatatca

SEQ ID NO: 8354 - DNA, 18 bp, Homo sapiens
cagtctgcgcgccggtcc

SEQ ID NO: 8355 - DNA, 18 bp, Homo sapiens
cagtctggttggagctgt

SEQ ID NO: 8356 - DNA, 19 bp, Homo sapiens
cagtcttcgtccgccgtta

SEQ ID NO: 8357 - DNA, 18 bp, Homo sapiens
cagtgacagggccgctcg

SEQ ID NO: 8358 - DNA, 21 bp, Homo sapiens
cagtgactgaagctccaaagg

SEQ ID NO: 8359 - DNA, 18 bp, Homo sapiens
cagtgagcgcggagactg

SEQ ID NO: 8360 - DNA, 18 bp, Homo sapiens
cagtgagggcgcagactg

SEQ ID NO: 8361 - DNA, 21 bp, Homo sapiens
cagtgagttcgacacaccatg

SEQ ID NO: 8362 - DNA, 19 bp, Homo sapiens
cagtgcaatggaccggcaa

SEQ ID NO: 8363 - DNA, 22 bp, Homo sapiens
cagtgcaccaagatggccgccc

SEQ ID NO: 8364 - DNA, 19 bp, Homo sapiens
cagtgcgagagcgcggcgg

SEQ ID NO: 8365 - DNA, 19 bp, Homo sapiens
cagtgcgctgagcgccgga

SEQ ID NO: 8366 - DNA, 20 bp, Homo sapiens
cagtgcggataaacaggaag

SEQ ID NO: 8367 - DNA, 17 bp, Homo sapiens
cagtggacgcggttctg

SEQ ID NO: 8368 - DNA, 20 bp, Homo sapiens
cagtggcacagtgagcgatt

SEQ ID NO: 8369 - DNA, 18 bp, Homo sapiens
cagtgggcgccatcttct

SEQ ID NO: 8370 - DNA, 20 bp, Homo sapiens
cagtggtactgaggcagacg

SEQ ID NO: 8371 - DNA, 16 bp, Homo sapiens
cagtggtgtggggtgc

SEQ ID NO: 8372 - DNA, 17 bp, Homo sapiens
cagtgtcgggaagatgg

SEQ ID NO: 8373 - DNA, 19 bp, Homo sapiens
cagtgtcgggaagatggcg

SEQ ID NO: 8374 - DNA, 18 bp, Homo sapiens
ggccgcggctgcatctct

SEQ ID NO: 8375 - DNA, 17 bp, Homo sapiens
ggccgcgggcggcgggc

SEQ ID NO: 8376 - DNA, 18 bp, Homo sapiens
ggccgcgggctccggcga

SEQ ID NO: 8377 - DNA, 16 bp, Homo sapiens
ggccgcggttccgcgc

SEQ ID NO: 8378 - DNA, 18 bp, Homo sapiens
ggccgctcccggctcgga

SEQ ID NO: 8379 - DNA, 19 bp, Homo sapiens
ggccgctgggcgtagctgc

SEQ ID NO: 8380 - DNA, 20 bp, Homo sapiens
ggccggaggctcccggcccg

SEQ ID NO: 8381 - DNA, 18 bp, Homo sapiens
ggccggaggtcctcagga

SEQ ID NO: 8382 - DNA, 19 bp, Homo sapiens
ggccggcacctcattcatt

SEQ ID NO: 8383 - DNA, 20 bp, Homo sapiens
ggccggcatggtggacttcc

SEQ ID NO: 8384 - DNA, 20 bp, Homo sapiens
ggccggcccggagcaccgag

SEQ ID NO: 8385 - DNA, 18 bp, Homo sapiens
ggccggcgacaagatggc

SEQ ID NO: 8386 - DNA, 18 bp, Homo sapiens
ggccggcgagggagcagc

SEQ ID NO: 8387 - DNA, 16 bp, Homo sapiens
ggccggcggccggcgt

SEQ ID NO: 8388 - DNA, 18 bp, Homo sapiens
ggccgggaagggccgggc

SEQ ID NO: 8389 - DNA, 19 bp, Homo sapiens
ggccgggagagggagaaca

SEQ ID NO: 8390 - DNA, 19 bp, Homo sapiens
ggccgggcctccgcgagta

SEQ ID NO: 8391 - DNA, 20 bp, Homo sapiens
ggccgggcgctgacggaggc

SEQ ID NO: 8392 - DNA, 18 bp, Homo sapiens
ggccgggcgtagacgcgg

SEQ ID NO: 8393 - DNA, 18 bp, Homo sapiens
ggccgggctgactccgct

SEQ ID NO: 8394 - DNA, 20 bp, Homo sapiens
ggccgggctgcgggaggagc

SEQ ID NO: 8395 - DNA, 19 bp, Homo sapiens
ggccgggctggctgcggcc

SEQ ID NO: 8396 - DNA, 20 bp, Homo sapiens
ggccgggctggctgcggccg

SEQ ID NO: 8397 - DNA, 19 bp, Homo sapiens
ggccggggaccgagccgca

SEQ ID NO: 8398 - DNA, 21 bp, Homo sapiens
ggccggggcactgtaaatggc

SEQ ID NO: 8399 - DNA, 18 bp, Homo sapiens
ggccggggcagggcggac

SEQ ID NO: 8400 - DNA, 18 bp, Homo sapiens
ggccggttgatacagttc

SEQ ID NO: 8401 - DNA, 18 bp, Homo sapiens
ggccgtctgtggtggcgc

SEQ ID NO: 8402 - DNA, 21 bp, Homo sapiens
ggccgtcttccccgcgcgcct

SEQ ID NO: 8403 - DNA, 18 bp, Homo sapiens
ggccgtgacaatgtcgcg

SEQ ID NO: 8404 - DNA, 17 bp, Homo sapiens
ggccgtgctgcttatgg

SEQ ID NO: 8405 - DNA, 22 bp, Homo sapiens
ggccgtgtgcagacccgcgtgt

SEQ ID NO: 8406 - DNA, 20 bp, Homo sapiens
ggccgtttccggctctggta

SEQ ID NO: 8407 - DNA, 24 bp, Homo sapiens
ggccgtttccggctctggtagtgt

SEQ ID NO: 8408 - DNA, 18 bp, Homo sapiens
ggcctcaccatacaggaa

SEQ ID NO: 8409 - DNA, 19 bp, Homo sapiens
ggcctccctctcccagcca

SEQ ID NO: 8410 - DNA, 18 bp, Homo sapiens
ggcctccttctccagccg

SEQ ID NO: 8411 - DNA, 18 bp, Homo sapiens
ggcctcggaccagccatt

SEQ ID NO: 8412 - DNA, 21 bp, Homo sapiens
ggcctgaggcgctgggcggcc

SEQ ID NO: 8413 - DNA, 20 bp, Homo sapiens
ggcctgccccgcggcaagat

SEQ ID NO: 8414 - DNA, 16 bp, Homo sapiens
ggcctgcggattgggc

SEQ ID NO: 8415 - DNA, 20 bp, Homo sapiens
ggcctggagatggagttcga

SEQ ID NO: 8416 - DNA, 19 bp, Homo sapiens
ggcctggagccgttcgtaa

SEQ ID NO: 8417 - DNA, 18 bp, Homo sapiens
ggcctggcgcagcatacg

SEQ ID NO: 8418 - DNA, 18 bp, Homo sapiens
ggcctggtttgcacccct

SEQ ID NO: 8419 - DNA, 23 bp, Homo sapiens
ggccttcggaaagagcccccggg

SEQ ID NO: 8420 - DNA, 17 bp, Homo sapiens
ggccttgagcgaggagg

SEQ ID NO: 8421 - DNA, 19 bp, Homo sapiens
ggccttgagcgaggaggag

SEQ ID NO: 8422 - DNA, 21 bp, Homo sapiens
ggccttggaagggatgagcaa

SEQ ID NO: 8423 - DNA, 18 bp, Homo sapiens
ggccttggttcctgtttg

SEQ ID NO: 8424 - DNA, 19 bp, Homo sapiens
ggcgaaatgagactgttcg

SEQ ID NO: 8425 - DNA, 17 bp, Homo sapiens
ggcgacacgccggcggg

SEQ ID NO: 8426 - DNA, 18 bp, Homo sapiens
ggcgacacgccggcgggc

SEQ ID NO: 8427 - DNA, 18 bp, Homo sapiens
ggcgacagccgagaagca

SEQ ID NO: 8428 - DNA, 16 bp, Homo sapiens
ggcgaccccggacctc

SEQ ID NO: 8429 - DNA, 18 bp, Homo sapiens
ggcgaccgtccccacccg

SEQ ID NO: 8430 - DNA, 18 bp, Homo sapiens
ggcgacggagcctggctg

SEQ ID NO: 8431 - DNA, 20 bp, Homo sapiens
cagtgtcgggaagatggcgc

SEQ ID NO: 8432 - DNA, 16 bp, Homo sapiens
cagtgtctcccggtcg

SEQ ID NO: 8433 - DNA, 17 bp, Homo sapiens
cagtgtctgtggtggcc

SEQ ID NO: 8434 - DNA, 18 bp, Homo sapiens
cagttagcggtggagagg

SEQ ID NO: 8435 - DNA, 18 bp, Homo sapiens
cagttcactcagacacgc

SEQ ID NO: 8436 - DNA, 18 bp, Homo sapiens
cagttcggcctctgagga

SEQ ID NO: 8437 - DNA, 18 bp, Homo sapiens
cagttctcggagagaaga

SEQ ID NO: 8438 - DNA, 19 bp, Homo sapiens
cagttgaaggcctttacga

SEQ ID NO: 8439 - DNA, 18 bp, Homo sapiens
cagttggaagatggcgga

SEQ ID NO: 8440 - DNA, 22 bp, Homo sapiens
cagttggacccagcagcccggc

SEQ ID NO: 8441 - DNA, 23 bp, Homo sapiens
cagttggcaagatggcgccggtg

SEQ ID NO: 8442 - DNA, 18 bp, Homo sapiens
cagtttaggaaatagagg

SEQ ID NO: 8443 - DNA, 16 bp, Homo sapiens
cagtttgaatcgcggt

SEQ ID NO: 8444 - DNA, 18 bp, Homo sapiens
cagtttgaatcgcggtgc

SEQ ID NO: 8445 - DNA, 21 bp, Homo sapiens
cataagaaggggaacgaaaga

SEQ ID NO: 8446 - DNA, 20 bp, Homo sapiens
cataatgacccaggctgaga

SEQ ID NO: 8447 - DNA, 21 bp, Homo sapiens
catactctttacggtactagg

SEQ ID NO: 8448 - DNA, 17 bp, Homo sapiens
catactgctagtggcgc

SEQ ID NO: 8449 - DNA, 19 bp, Homo sapiens
catagctttctcaactatg

SEQ ID NO: 8450 - DNA, 20 bp, Homo sapiens
catagctttctcaactatgg

SEQ ID NO: 8451 - DNA, 17 bp, Homo sapiens
catcacggcggccgcag

SEQ ID NO: 8452 - DNA, 19 bp, Homo sapiens
catcagaggcttagaggcg

SEQ ID NO: 8453 - DNA, 16 bp, Homo sapiens
catcaggtaggctgcg

SEQ ID NO: 8454 - DNA, 21 bp, Homo sapiens
catcatggtgagctcgctttg

SEQ ID NO: 8455 - DNA, 18 bp, Homo sapiens
catccccctctcccagca

SEQ ID NO: 8456 - DNA, 18 bp, Homo sapiens
catcccgcgagctgccgc

SEQ ID NO: 8457 - DNA, 18 bp, Homo sapiens
catcccgggctcgcggga

SEQ ID NO: 8458 - DNA, 17 bp, Homo sapiens
catcccggtccctgcag

SEQ ID NO: 8459 - DNA, 18 bp, Homo sapiens
catccctatagagaagaa

SEQ ID NO: 8460 - DNA, 16 bp, Homo sapiens
catccgacgcctggca

SEQ ID NO: 8461 - DNA, 18 bp, Homo sapiens
catccgccattttgtgag

SEQ ID NO: 8462 - DNA, 18 bp, Homo sapiens
catcctcgggagcgacca

SEQ ID NO: 8463 - DNA, 17 bp, Homo sapiens
catcgaagatggcggcg

SEQ ID NO: 8464 - DNA, 24 bp, Homo sapiens
catcgacacttcgaacgcacttgc

SEQ ID NO: 8465 - DNA, 17 bp, Homo sapiens
catcgcggtccccggct

SEQ ID NO: 8466 - DNA, 19 bp, Homo sapiens
catcgggcagcatgagcgg

SEQ ID NO: 8467 - DNA, 15 bp, Homo sapiens
catcgggggcaacca

SEQ ID NO: 8468 - DNA, 24 bp, Homo sapiens
catcgggtccgacacaggctggac

SEQ ID NO: 8469 - DNA, 20 bp, Homo sapiens
catcgtttttaagaattcaa

SEQ ID NO: 8470 - DNA, 16 bp, Homo sapiens
catctatcagcaggct

SEQ ID NO: 8471 - DNA, 18 bp, Homo sapiens
catctccgcgaccaggaa

SEQ ID NO: 8472 - DNA, 16 bp, Homo sapiens
catctcgccgtgagac

SEQ ID NO: 8473 - DNA, 17 bp, Homo sapiens
catctctccgcgcggcc

SEQ ID NO: 8474 - DNA, 21 bp, Homo sapiens
catctgagtaacatggcggcg

SEQ ID NO: 8475 - DNA, 20 bp, Homo sapiens
catctggacgcttcttcagg

SEQ ID NO: 8476 - DNA, 22 bp, Homo sapiens
catcttacgggcggggccggaa

SEQ ID NO: 8477 - DNA, 17 bp, Homo sapiens
catcttccctgacggtc

SEQ ID NO: 8478 - DNA, 18 bp, Homo sapiens
catcttccctgacggtca

SEQ ID NO: 8479 - DNA, 17 bp, Homo sapiens
catcttgtttgtttgag

SEQ ID NO: 8480 - DNA, 16 bp, Homo sapiens
catgacacgtttcccg

SEQ ID NO: 8481 - DNA, 16 bp, Homo sapiens
catgacagcagatccg

SEQ ID NO: 8482 - DNA, 20 bp, Homo sapiens
catgaccaggaccagggcag

SEQ ID NO: 8483 - DNA, 16 bp, Homo sapiens
catgacgccggtgcag

SEQ ID NO: 8484 - DNA, 18 bp, Homo sapiens
catgatggatgtgtctgg

SEQ ID NO: 8485 - DNA, 23 bp, Homo sapiens
catgcacaaggcggggctgctag

SEQ ID NO: 8486 - DNA, 20 bp, Homo sapiens
catgcacagctgggagcgcc

SEQ ID NO: 8487 - DNA, 18 bp, Homo sapiens
catgcaggacgcggagaa

SEQ ID NO: 8488 - DNA, 18 bp, Homo sapiens
ggcgacggaggaggagga

SEQ ID NO: 8489 - DNA, 16 bp, Homo sapiens
ggcgacggtggtggtg

SEQ ID NO: 8490 - DNA, 17 bp, Homo sapiens
ggcgacgtgagtgaggg

SEQ ID NO: 8491 - DNA, 18 bp, Homo sapiens
ggcgactgagcggacaaa

SEQ ID NO: 8492 - DNA, 19 bp, Homo sapiens
ggcgactgtggagttagcg

SEQ ID NO: 8493 - DNA, 18 bp, Homo sapiens
ggcgactgtggcgacggc

SEQ ID NO: 8494 - DNA, 18 bp, Homo sapiens
ggcgagaagcgcgactgg

SEQ ID NO: 8495 - DNA, 18 bp, Homo sapiens
ggcgagagctgcgaaagg

SEQ ID NO: 8496 - DNA, 21 bp, Homo sapiens
ggcgagagggacaggagcgtg

SEQ ID NO: 8497 - DNA, 19 bp, Homo sapiens
ggcgagcactggctacgtg

SEQ ID NO: 8498 - DNA, 19 bp, Homo sapiens
ggcgagcagcagggcctgg

SEQ ID NO: 8499 - DNA, 18 bp, Homo sapiens
ggcgagcgaacatggcag

SEQ ID NO: 8500 - DNA, 19 bp, Homo sapiens
ggcgagctagcggacgcaa

SEQ ID NO: 8501 - DNA, 16 bp, Homo sapiens
ggcgagctagtgctgc

SEQ ID NO: 8502 - DNA, 19 bp, Homo sapiens
ggcgagctgcgctgccgcc

SEQ ID NO: 8503 - DNA, 18 bp, Homo sapiens
ggcgaggcggggagagac

SEQ ID NO: 8504 - DNA, 19 bp, Homo sapiens
ggcgaggcggtcgcttcga

SEQ ID NO: 8505 - DNA, 17 bp, Homo sapiens
ggcgagggacagacgca

SEQ ID NO: 8506 - DNA, 18 bp, Homo sapiens
ggcgagtcggtgagcagc

SEQ ID NO: 8507 - DNA, 21 bp, Homo sapiens
ggcgagtgacgtacgctcgcg

SEQ ID NO: 8508 - DNA, 17 bp, Homo sapiens
ggcgagtgcggcgctga

SEQ ID NO: 8509 - DNA, 19 bp, Homo sapiens
ggcgagtgcgtcgagctcg

SEQ ID NO: 8510 - DNA, 18 bp, Homo sapiens
ggcgatcgaaaagattct

SEQ ID NO: 8511 - DNA, 18 bp, Homo sapiens
ggcgatcgggccgggccg

SEQ ID NO: 8512 - DNA, 21 bp, Homo sapiens
ggcgatggcggctgagaggag

SEQ ID NO: 8513 - DNA, 18 bp, Homo sapiens
ggcgcacagcggcgcgct

SEQ ID NO: 8514 - DNA, 17 bp, Homo sapiens
ggcgcacgaccagggcg

SEQ ID NO: 8515 - DNA, 21 bp, Homo sapiens
ggcgcacgagggaggaacgcg

SEQ ID NO: 8516 - DNA, 18 bp, Homo sapiens
ggcgcagatcatggcagg

SEQ ID NO: 8517 - DNA, 18 bp, Homo sapiens
ggcgcagcgcgggccggg

SEQ ID NO: 8518 - DNA, 18 bp, Homo sapiens
ggcgcaggaggcgagcgg

SEQ ID NO: 8519 - DNA, 20 bp, Homo sapiens
ggcgcaggcggccgctgcca

SEQ ID NO: 8520 - DNA, 17 bp, Homo sapiens
ggcgcagggcaccatgg

SEQ ID NO: 8521 - DNA, 16 bp, Homo sapiens
ggcgcagtgttgggac

SEQ ID NO: 8522 - DNA, 18 bp, Homo sapiens
ggcgcagtgttgggactg

SEQ ID NO: 8523 - DNA, 19 bp, Homo sapiens
ggcgcagtgttgggactgt

SEQ ID NO: 8524 - DNA, 19 bp, Homo sapiens
ggcgcatactgctagtggc

SEQ ID NO: 8525 - DNA, 18 bp, Homo sapiens
ggcgccacgagagcgggc

SEQ ID NO: 8526 - DNA, 18 bp, Homo sapiens
ggcgccaggtgctggggg

SEQ ID NO: 8527 - DNA, 18 bp, Homo sapiens
ggcgcccagaggctgctg

SEQ ID NO: 8528 - DNA, 23 bp, Homo sapiens
ggcgcccatgggggtggcggggc

SEQ ID NO: 8529 - DNA, 17 bp, Homo sapiens
ggcgccgagtgtcgggc

SEQ ID NO: 8530 - DNA, 18 bp, Homo sapiens
ggcgccgagtgtcgggcg

SEQ ID NO: 8531 - DNA, 19 bp, Homo sapiens
ggcgccgagtgtcgggcgc

SEQ ID NO: 8532 - DNA, 16 bp, Homo sapiens
ggcgccgcctccaccc

SEQ ID NO: 8533 - DNA, 18 bp, Homo sapiens
ggcgccgcgatgttcgac

SEQ ID NO: 8534 - DNA, 19 bp, Homo sapiens
ggcgccgctccgccactcg

SEQ ID NO: 8535 - DNA, 17 bp, Homo sapiens
ggcgccggcggccgccg

SEQ ID NO: 8536 - DNA, 20 bp, Homo sapiens
ggcgccggctcccaggatgc

SEQ ID NO: 8537 - DNA, 21 bp, Homo sapiens
ggcgccgggccgcctctgagg

SEQ ID NO: 8538 - DNA, 17 bp, Homo sapiens
ggcgccggggcgggcgc

SEQ ID NO: 8539 - DNA, 18 bp, Homo sapiens
ggcgccggtcgctggcag

SEQ ID NO: 8540 - DNA, 17 bp, Homo sapiens
ggcgccgtccgtccttc

SEQ ID NO: 8541 - DNA, 18 bp, Homo sapiens
ggcgcctgcggttttctt

SEQ ID NO: 8542 - DNA, 24 bp, Homo sapiens
ggcgcctgtgggcacagacaagga

SEQ ID NO: 8543 - DNA, 18 bp, Homo sapiens
ggcgccttttaagagata

SEQ ID NO: 8544 - DNA, 18 bp, Homo sapiens
ggcgcgagcctgcgtttt

SEQ ID NO: 8545 - DNA, 17 bp, Homo sapiens
catgcctgagccagcga

SEQ ID NO: 8546 - DNA, 20 bp, Homo sapiens
catgcgcgctcgtggggtgc

SEQ ID NO: 8547 - DNA, 21 bp, Homo sapiens
catggacttgtacagcacccc

SEQ ID NO: 8548 - DNA, 16 bp, Homo sapiens
catggagcggaggaga

SEQ ID NO: 8549 - DNA, 19 bp, Homo sapiens
catggaggatgatttcatg

SEQ ID NO: 8550 - DNA, 18 bp, Homo sapiens
catggcagctcggactgg

SEQ ID NO: 8551 - DNA, 22 bp, Homo sapiens
catggcggacggcggctcggag

SEQ ID NO: 8552 - DNA, 18 bp, Homo sapiens
catggcggagaatcactg

SEQ ID NO: 8553 - DNA, 16 bp, Homo sapiens
catggcggcgcccagc

SEQ ID NO: 8554 - DNA, 18 bp, Homo sapiens
catggcggcggaacgcgg

SEQ ID NO: 8555 - DNA, 20 bp, Homo sapiens
catggcggcggcgccggtag

SEQ ID NO: 8556 - DNA, 20 bp, Homo sapiens
catggcgggacaggaggatc

SEQ ID NO: 8557 - DNA, 19 bp, Homo sapiens
catggctgctttgagacag

SEQ ID NO: 8558 - DNA, 21 bp, Homo sapiens
catggggccatgggtgaacgc

SEQ ID NO: 8559 - DNA, 18 bp, Homo sapiens
catgtccgagactgcgcc

SEQ ID NO: 8560 - DNA, 18 bp, Homo sapiens
catgtggagccgacggca

SEQ ID NO: 8561 - DNA, 19 bp, Homo sapiens
cattactattgtgcggctg

SEQ ID NO: 8562 - DNA, 17 bp, Homo sapiens
cattcattcattccccg

SEQ ID NO: 8563 - DNA, 19 bp, Homo sapiens
cattcggatttggcgcgag

SEQ ID NO: 8564 - DNA, 18 bp, Homo sapiens
cattcggcagagggcgct

SEQ ID NO: 8565 - DNA, 19 bp, Homo sapiens
cattcttctccttgtaaaa

SEQ ID NO: 8566 - DNA, 16 bp, Homo sapiens
cattgatcatcgacac

SEQ ID NO: 8567 - DNA, 17 bp, Homo sapiens
cattgatcatcgacact

SEQ ID NO: 8568 - DNA, 23 bp, Homo sapiens
cattgatcatcgacacttcgaac

SEQ ID NO: 8569 - DNA, 18 bp, Homo sapiens
cattgcctcgtgcccgcg

SEQ ID NO: 8570 - DNA, 16 bp, Homo sapiens
cattgcgaagagaaag

SEQ ID NO: 8571 - DNA, 19 bp, Homo sapiens
cattgctctggagccagca

SEQ ID NO: 8572 - DNA, 18 bp, Homo sapiens
cattggcggagacggttg

SEQ ID NO: 8573 - DNA, 21 bp, Homo sapiens
cattgttggcggctctcggtg

SEQ ID NO: 8574 - DNA, 19 bp, Homo sapiens
catttccgtcgagttaaac

SEQ ID NO: 8575 - DNA, 17 bp, Homo sapiens
catttcctcccagcctc

SEQ ID NO: 8576 - DNA, 16 bp, Homo sapiens
catttcgttctcccgc

SEQ ID NO: 8577 - DNA, 20 bp, Homo sapiens
cattttaattcatatttgag

SEQ ID NO: 8578 - DNA, 20 bp, Homo sapiens
cattttgctggagcctgcga

SEQ ID NO: 8579 - DNA, 20 bp, Homo sapiens
cattttggcaagctctatca

SEQ ID NO: 8580 - DNA, 18 bp, Homo sapiens
cattttggtgcgagagaa

SEQ ID NO: 8581 - DNA, 19 bp, Homo sapiens
cattttggtgcgagagaaa

SEQ ID NO: 8582 - DNA, 17 bp, Homo sapiens
cattttgtaaggttctc

SEQ ID NO: 8583 - DNA, 23 bp, Homo sapiens
cattttgtcccagtcagtccgga

SEQ ID NO: 8584 - DNA, 18 bp, Homo sapiens
cattttgtctcggcagcg

SEQ ID NO: 8585 - DNA, 20 bp, Homo sapiens
catttttcaataatttcctc

SEQ ID NO: 8586 - DNA, 22 bp, Homo sapiens
catttttttgggtgagtgtttt

SEQ ID NO: 8587 - DNA, 18 bp, Homo sapiens
ccaaaacaggtggaatcc

SEQ ID NO: 8588 - DNA, 20 bp, Homo sapiens
ccaaaagctcggcatggctg

SEQ ID NO: 8589 - DNA, 18 bp, Homo sapiens
ccaaaatatctccgagtc

SEQ ID NO: 8590 - DNA, 22 bp, Homo sapiens
ccaaaatcagagctggaacctg

SEQ ID NO: 8591 - DNA, 21 bp, Homo sapiens
ccaaacctcttcgaggcacaa

SEQ ID NO: 8592 - DNA, 16 bp, Homo sapiens
ccaaacgacgggggtc

SEQ ID NO: 8593 - DNA, 22 bp, Homo sapiens
ccaaagccctaagaaacacagc

SEQ ID NO: 8594 - DNA, 18 bp, Homo sapiens
ccaaagggttgtgcgtca

SEQ ID NO: 8595 - DNA, 18 bp, Homo sapiens
ccaaatgggtcgcagtcg

SEQ ID NO: 8596 - DNA, 18 bp, Homo sapiens
ccaacacctacaacaggc

SEQ ID NO: 8597 - DNA, 17 bp, Homo sapiens
ccaacatgctctgtctg

SEQ ID NO: 8598 - DNA, 18 bp, Homo sapiens
ccaacatggcggagctga

SEQ ID NO: 8599 - DNA, 18 bp, Homo sapiens
ccaacatggcggcgccca

SEQ ID NO: 8600 - DNA, 17 bp, Homo sapiens
ccaacccttttcttccg

SEQ ID NO: 8601 - DNA, 19 bp, Homo sapiens
ccaacccttttcttccgca

SEQ ID NO: 8602 - DNA, 20 bp, Homo sapiens
ggcgcgagcctgcgttttcc

SEQ ID NO: 8603 - DNA, 18 bp, Homo sapiens
ggcgcgagtgaggaaagg

SEQ ID NO: 8604 - DNA, 19 bp, Homo sapiens
ggcgcgcgcggaggccgcg

SEQ ID NO: 8605 - DNA, 18 bp, Homo sapiens
ggcgcgcgctcccttatc

SEQ ID NO: 8606 - DNA, 18 bp, Homo sapiens
ggcgcgcggcggtagggt

SEQ ID NO: 8607 - DNA, 17 bp, Homo sapiens
ggcgcgcgggtcggggc

SEQ ID NO: 8608 - DNA, 17 bp, Homo sapiens
ggcgcggaatctccgac

SEQ ID NO: 8609 - DNA, 18 bp, Homo sapiens
ggcgcggagcggagcggc

SEQ ID NO: 8610 - DNA, 18 bp, Homo sapiens
ggcgcggagcggagcggg

SEQ ID NO: 8611 - DNA, 19 bp, Homo sapiens
ggcgcggaggagctggagg

SEQ ID NO: 8612 - DNA, 18 bp, Homo sapiens
ggcgcggcgtgcggcacg

SEQ ID NO: 8613 - DNA, 18 bp, Homo sapiens
ggcgcgggcggccggcca

SEQ ID NO: 8614 - DNA, 14 bp, Homo sapiens
ggcgcgggggccaa

SEQ ID NO: 8615 - DNA, 18 bp, Homo sapiens
ggcgcgtggggaggcgcc

SEQ ID NO: 8616 - DNA, 17 bp, Homo sapiens
ggcgctagcctcggggc

SEQ ID NO: 8617 - DNA, 18 bp, Homo sapiens
ggcgctcacaattgccac

SEQ ID NO: 8618 - DNA, 19 bp, Homo sapiens
ggcgctcgtccctcatttc

SEQ ID NO: 8619 - DNA, 19 bp, Homo sapiens
ggcgctgccgggtgaaatc

SEQ ID NO: 8620 - DNA, 17 bp, Homo sapiens
ggcgctgcggggtaggc

SEQ ID NO: 8621 - DNA, 18 bp, Homo sapiens
ggcgctgctcgcgatgca

SEQ ID NO: 8622 - DNA, 22 bp, Homo sapiens
ggcgctgggccgggggctggag

SEQ ID NO: 8623 - DNA, 19 bp, Homo sapiens
ggcgcttccttcttctctt

SEQ ID NO: 8624 - DNA, 18 bp, Homo sapiens
ggcgcttgggcactcagt

SEQ ID NO: 8625 - DNA, 18 bp, Homo sapiens
ggcgctttaggggaactg

SEQ ID NO: 8626 - DNA, 16 bp, Homo sapiens
ggcggaaaggatggcg

SEQ ID NO: 8627 - DNA, 18 bp, Homo sapiens
ggcggaaagtggtagcga

SEQ ID NO: 8628 - DNA, 20 bp, Homo sapiens
ggcggaacatggcggaagcg

SEQ ID NO: 8629 - DNA, 21 bp, Homo sapiens
ggcggaacatggcggaagcgt

SEQ ID NO: 8630 - DNA, 18 bp, Homo sapiens
ggcggaacggtgtctcct

SEQ ID NO: 8631 - DNA, 18 bp, Homo sapiens
ggcggaagcggagagcaa

SEQ ID NO: 8632 - DNA, 18 bp, Homo sapiens
ggcggaagcggagtgagt

SEQ ID NO: 8633 - DNA, 18 bp, Homo sapiens
ggcggacacaggcagggc

SEQ ID NO: 8634 - DNA, 16 bp, Homo sapiens
ggcggacacgtggcaa

SEQ ID NO: 8635 - DNA, 18 bp, Homo sapiens
ggcggacagactgcggga

SEQ ID NO: 8636 - DNA, 17 bp, Homo sapiens
ggcggaccgcgcggctg

SEQ ID NO: 8637 - DNA, 19 bp, Homo sapiens
ggcggaccttgattcgcct

SEQ ID NO: 8638 - DNA, 17 bp, Homo sapiens
ggcggacgaggagaagc

SEQ ID NO: 8639 - DNA, 16 bp, Homo sapiens
ggcggacggaaaggga

SEQ ID NO: 8640 - DNA, 18 bp, Homo sapiens
ggcggacggaaagggaga

SEQ ID NO: 8641 - DNA, 16 bp, Homo sapiens
ggcggacggagccggc

SEQ ID NO: 8642 - DNA, 22 bp, Homo sapiens
ggcggacggcggacggcggacg

SEQ ID NO: 8643 - DNA, 18 bp, Homo sapiens
ggcggacggcggctcgga

SEQ ID NO: 8644 - DNA, 18 bp, Homo sapiens
ggcggacggcgtggacca

SEQ ID NO: 8645 - DNA, 17 bp, Homo sapiens
ggcggagcccgggaggc

SEQ ID NO: 8646 - DNA, 18 bp, Homo sapiens
ggcggagcgcaggcctcg

SEQ ID NO: 8647 - DNA, 18 bp, Homo sapiens
ggcggagcgggagaaggg

SEQ ID NO: 8648 - DNA, 18 bp, Homo sapiens
ggcggagctggagacgtg

SEQ ID NO: 8649 - DNA, 19 bp, Homo sapiens
ggcggagctggtggaggcc

SEQ ID NO: 8650 - DNA, 18 bp, Homo sapiens
ggcggaggaaagtgcagg

SEQ ID NO: 8651 - DNA, 17 bp, Homo sapiens
ggcggaggaagtgagga

SEQ ID NO: 8652 - DNA, 20 bp, Homo sapiens
ggcggaggaagtgaggacgg

SEQ ID NO: 8653 - DNA, 19 bp, Homo sapiens
ggcggaggaggagaaagga

SEQ ID NO: 8654 - DNA, 22 bp, Homo sapiens
ggcggaggaggcgaattagtcc

SEQ ID NO: 8655 - DNA, 19 bp, Homo sapiens
ggcggaggcagagaccgag

SEQ ID NO: 8656 - DNA, 19 bp, Homo sapiens
ggcggaggcgcgggcaggg

SEQ ID NO: 8657 - DNA, 21 bp, Homo sapiens
ggcggaggctacgtgaagaga

SEQ ID NO: 8658 - DNA, 17 bp, Homo sapiens
ggcggagggagtaatgg

SEQ ID NO: 8659 - DNA, 18 bp, Homo sapiens
ccaacgacccaaaaaagg

SEQ ID NO: 8660 - DNA, 20 bp, Homo sapiens
ccaacgaggctccctggagc

SEQ ID NO: 8661 - DNA, 19 bp, Homo sapiens
ccaacggaccggacagaga

SEQ ID NO: 8662 - DNA, 18 bp, Homo sapiens
ccaactaagcctgggtcg

SEQ ID NO: 8663 - DNA, 19 bp, Homo sapiens
ccaactcccagacacctcg

SEQ ID NO: 8664 - DNA, 20 bp, Homo sapiens
ccaactcccagacacctcgc

SEQ ID NO: 8665 - DNA, 20 bp, Homo sapiens
ccaactgggagagctgcagc

SEQ ID NO: 8666 - DNA, 18 bp, Homo sapiens
ccaagagactgctggcgc

SEQ ID NO: 8667 - DNA, 20 bp, Homo sapiens
ccaagatggcgaccgcggcg

SEQ ID NO: 8668 - DNA, 18 bp, Homo sapiens
ccaagatggctgcctcca

SEQ ID NO: 8669 - DNA, 19 bp, Homo sapiens
ccaagcaagatggcagctt

SEQ ID NO: 8670 - DNA, 18 bp, Homo sapiens
ccaagcggagctgcccct

SEQ ID NO: 8671 - DNA, 20 bp, Homo sapiens
ccaagcttgggctttgcacc

SEQ ID NO: 8672 - DNA, 19 bp, Homo sapiens
ccaaggaaggaagaaatgt

SEQ ID NO: 8673 - DNA, 18 bp, Homo sapiens
ccaagtggaaactgcagg

SEQ ID NO: 8674 - DNA, 17 bp, Homo sapiens
ccaataggctgccaata

SEQ ID NO: 8675 - DNA, 18 bp, Homo sapiens
ccaatcggagggtaaatg

SEQ ID NO: 8676 - DNA, 18 bp, Homo sapiens
ccaatctgtccgcggctg

SEQ ID NO: 8677 - DNA, 18 bp, Homo sapiens
ccacacaggagtgggtga

SEQ ID NO: 8678 - DNA, 20 bp, Homo sapiens
ccacaccccttgcgcccgca

SEQ ID NO: 8679 - DNA, 18 bp, Homo sapiens
ccacactccgagatgagg

SEQ ID NO: 8680 - DNA, 18 bp, Homo sapiens
ccacagcgcgggggaacg

SEQ ID NO: 8681 - DNA, 19 bp, Homo sapiens
ccacagctggaaacccatg

SEQ ID NO: 8682 - DNA, 17 bp, Homo sapiens
ccacatggacggagctg

SEQ ID NO: 8683 - DNA, 19 bp, Homo sapiens
ccaccatgtaaacggcgcc

SEQ ID NO: 8684 - DNA, 21 bp, Homo sapiens
ccaccgccatgtgacgggaag

SEQ ID NO: 8685 - DNA, 18 bp, Homo sapiens
ccaccggaaattagtcga

SEQ ID NO: 8686 - DNA, 18 bp, Homo sapiens
ccacctctgagcagccgg

SEQ ID NO: 8687 - DNA, 16 bp, Homo sapiens
ccacgagagcccggga

SEQ ID NO: 8688 - DNA, 18 bp, Homo sapiens
ccacggaaaccaagacga

SEQ ID NO: 8689 - DNA, 17 bp, Homo sapiens
ccacggtgcttccgggt

SEQ ID NO: 8690 - DNA, 21 bp, Homo sapiens
ccacggtttcggtagcgacgg

SEQ ID NO: 8691 - DNA, 20 bp, Homo sapiens
ccacgtgtgcgggagggaag

SEQ ID NO: 8692 - DNA, 17 bp, Homo sapiens
ccactaccacgtcccca

SEQ ID NO: 8693 - DNA, 17 bp, Homo sapiens
ccactcccacctccatg

SEQ ID NO: 8694 - DNA, 17 bp, Homo sapiens
ccactccggctgccgcg

SEQ ID NO: 8695 - DNA, 21 bp, Homo sapiens
ccactcgcacagctaggtcgg

SEQ ID NO: 8696 - DNA, 20 bp, Homo sapiens
ccactcgcgggaagcgagag

SEQ ID NO: 8697 - DNA, 17 bp, Homo sapiens
ccactgccactgccacc

SEQ ID NO: 8698 - DNA, 19 bp, Homo sapiens
ccactgccactgccacctc

SEQ ID NO: 8699 - DNA, 23 bp, Homo sapiens
ccacttaaaaaccctgggacgag

SEQ ID NO: 8700 - DNA, 17 bp, Homo sapiens
ccacttgattctggagg

SEQ ID NO: 8701 - DNA, 18 bp, Homo sapiens
ccagaaaggagtcggaag

SEQ ID NO: 8702 - DNA, 17 bp, Homo sapiens
ccagaaagtttcggttc

SEQ ID NO: 8703 - DNA, 18 bp, Homo sapiens
ccagaacaggctgacagc

SEQ ID NO: 8704 - DNA, 23 bp, Homo sapiens
ccagaacctgcggagcacaactg

SEQ ID NO: 8705 - DNA, 21 bp, Homo sapiens
ccagaagctggctggtgagga

SEQ ID NO: 8706 - DNA, 18 bp, Homo sapiens
ccagaatccgtgaacatg

SEQ ID NO: 8707 - DNA, 18 bp, Homo sapiens
ccagaccggaacccaaga

SEQ ID NO: 8708 - DNA, 18 bp, Homo sapiens
ccagacctgacaggggca

SEQ ID NO: 8709 - DNA, 18 bp, Homo sapiens
ccagactggtagtgaggc

SEQ ID NO: 8710 - DNA, 17 bp, Homo sapiens
ccagagactgacgagtg

SEQ ID NO: 8711 - DNA, 20 bp, Homo sapiens
ccagagactgacgagtgcgg

SEQ ID NO: 8712 - DNA, 17 bp, Homo sapiens
ccagagcaagcatggag

SEQ ID NO: 8713 - DNA, 18 bp, Homo sapiens
ccagagctccagcggcgc

SEQ ID NO: 8714 - DNA, 23 bp, Homo sapiens
ccagagctgctggagcgctcggg

SEQ ID NO: 8715 - DNA, 18 bp, Homo sapiens
ccagaggagctcggcctg

SEQ ID NO: 8716 - DNA, 20 bp, Homo sapiens
ggcggagggcgtgagcggcg

SEQ ID NO: 8717 - DNA, 20 bp, Homo sapiens
ggcggagttaaagtcaaagc

SEQ ID NO: 8718 - DNA, 20 bp, Homo sapiens
ggcggatctggacacccagc

SEQ ID NO: 8719 - DNA, 18 bp, Homo sapiens
ggcggatctggacgtggt

SEQ ID NO: 8720 - DNA, 18 bp, Homo sapiens
ggcggatgacaaggtgag

SEQ ID NO: 8721 - DNA, 17 bp, Homo sapiens
ggcggcagcagctcccg

SEQ ID NO: 8722 - DNA, 19 bp, Homo sapiens
ggcggcagccgcgaactcc

SEQ ID NO: 8723 - DNA, 18 bp, Homo sapiens
ggcggcagccggcagctc

SEQ ID NO: 8724 - DNA, 19 bp, Homo sapiens
ggcggcagcggcgtctgtg

SEQ ID NO: 8725 - DNA, 16 bp, Homo sapiens
ggcggcagctggagcg

SEQ ID NO: 8726 - DNA, 17 bp, Homo sapiens
ggcggcagctgtggccc

SEQ ID NO: 8727 - DNA, 20 bp, Homo sapiens
ggcggcagggaccagcagtt

SEQ ID NO: 8728 - DNA, 18 bp, Homo sapiens
ggcggcagtggccgtgtg

SEQ ID NO: 8729 - DNA, 18 bp, Homo sapiens
ggcggcattaaacggttg

SEQ ID NO: 8730 - DNA, 18 bp, Homo sapiens
ggcggccgcaccatggac

SEQ ID NO: 8731 - DNA, 21 bp, Homo sapiens
ggcggccgcagagcagttcag

SEQ ID NO: 8732 - DNA, 22 bp, Homo sapiens
ggcggccgccattttgtgcagt

SEQ ID NO: 8733 - DNA, 19 bp, Homo sapiens
ggcggccggaagctggctg

SEQ ID NO: 8734 - DNA, 18 bp, Homo sapiens
ggcggccgggctggacct

SEQ ID NO: 8735 - DNA, 18 bp, Homo sapiens
ggcggcctggcagctggc

SEQ ID NO: 8736 - DNA, 18 bp, Homo sapiens
ggcggccttcgtccggcg

SEQ ID NO: 8737 - DNA, 16 bp, Homo sapiens
ggcggcgacggcaccc

SEQ ID NO: 8738 - DNA, 18 bp, Homo sapiens
ggcggcgacggtggtggt

SEQ ID NO: 8739 - DNA, 19 bp, Homo sapiens
ggcggcgaggacgagtctg

SEQ ID NO: 8740 - DNA, 18 bp, Homo sapiens
ggcggcgaggactggcga

SEQ ID NO: 8741 - DNA, 21 bp, Homo sapiens
ggcggcgaggcaaaggaagtt

SEQ ID NO: 8742 - DNA, 19 bp, Homo sapiens
ggcggcgcagacaaaggca

SEQ ID NO: 8743 - DNA, 21 bp, Homo sapiens
ggcggcgccacgagagcgggc

SEQ ID NO: 8744 - DNA, 18 bp, Homo sapiens
ggcggcgcccagaggctg

SEQ ID NO: 8745 - DNA, 18 bp, Homo sapiens
ggcggcgcggccatgaag

SEQ ID NO: 8746 - DNA, 19 bp, Homo sapiens
ggcggcgcgggcggccggg

SEQ ID NO: 8747 - DNA, 20 bp, Homo sapiens
ggcggcgctggagagggggc

SEQ ID NO: 8748 - DNA, 18 bp, Homo sapiens
ggcggcggaatggagacg

SEQ ID NO: 8749 - DNA, 19 bp, Homo sapiens
ggcggcggcagcggtgagc

SEQ ID NO: 8750 - DNA, 22 bp, Homo sapiens
ggcggcggccgacgcggaccgg

SEQ ID NO: 8751 - DNA, 17 bp, Homo sapiens
ggcggcggcgatggcgg

SEQ ID NO: 8752 - DNA, 17 bp, Homo sapiens
ggcggcggcggaacgaa

SEQ ID NO: 8753 - DNA, 19 bp, Homo sapiens
ggcggcggcggccgaggaa

SEQ ID NO: 8754 - DNA, 18 bp, Homo sapiens
ggcggcggcggcggcggc

SEQ ID NO: 8755 - DNA, 19 bp, Homo sapiens
ggcggcggcgggagcggga

SEQ ID NO: 8756 - DNA, 18 bp, Homo sapiens
ggcggcggcggggtcggc

SEQ ID NO: 8757 - DNA, 17 bp, Homo sapiens
ggcggcggcggtggcgg

SEQ ID NO: 8758 - DNA, 18 bp, Homo sapiens
ggcggcggcggttccagc

SEQ ID NO: 8759 - DNA, 21 bp, Homo sapiens
ggcggcggctgcagagccagg

SEQ ID NO: 8760 - DNA, 18 bp, Homo sapiens
ggcggcggctgctgattg

SEQ ID NO: 8761 - DNA, 18 bp, Homo sapiens
ggcggcgggactcacggc

SEQ ID NO: 8762 - DNA, 18 bp, Homo sapiens
ggcggcgggcggcattct

SEQ ID NO: 8763 - DNA, 17 bp, Homo sapiens
ggcggcgggcggcgggc

SEQ ID NO: 8764 - DNA, 17 bp, Homo sapiens
ggcggcgggtccggccg

SEQ ID NO: 8765 - DNA, 18 bp, Homo sapiens
ggcggcggtgactgtgca

SEQ ID NO: 8766 - DNA, 20 bp, Homo sapiens
ggcggcggtgagttcgaggt

SEQ ID NO: 8767 - DNA, 21 bp, Homo sapiens
ggcggcggttttggctgtgtg

SEQ ID NO: 8768 - DNA, 16 bp, Homo sapiens
ggcggcgtagtagggc

SEQ ID NO: 8769 - DNA, 18 bp, Homo sapiens
ggcggcgtggcgctgaga

SEQ ID NO: 8770 - DNA, 17 bp, Homo sapiens
ggcggcgtgggagggag

SEQ ID NO: 8771 - DNA, 18 bp, Homo sapiens
ggcggctagggcggctcc

SEQ ID NO: 8772 - DNA, 17 bp, Homo sapiens
ggcggctctgcagagtc

SEQ ID NO: 8773 - DNA, 17 bp, Homo sapiens
ccagaggctgctgaggc

SEQ ID NO: 8774 - DNA, 21 bp, Homo sapiens
ccagaggctgctgaggcgcgg

SEQ ID NO: 8775 - DNA, 21 bp, Homo sapiens
ccagaggtgagtccggtgaag

SEQ ID NO: 8776 - DNA, 17 bp, Homo sapiens
ccagagtccctttctcg

SEQ ID NO: 8777 - DNA, 19 bp, Homo sapiens
ccagagtgaggaggacgca

SEQ ID NO: 8778 - DNA, 18 bp, Homo sapiens
ccagatctgcacgggcta

SEQ ID NO: 8779 - DNA, 17 bp, Homo sapiens
ccagcaacggcggcctc

SEQ ID NO: 8780 - DNA, 19 bp, Homo sapiens
ccagcagcggttgtcgggt

SEQ ID NO: 8781 - DNA, 18 bp, Homo sapiens
ccagcatgaaagtctctg

SEQ ID NO: 8782 - DNA, 21 bp, Homo sapiens
ccagccccccggaggtgatcc

SEQ ID NO: 8783 - DNA, 18 bp, Homo sapiens
ccagccttccccgcgagc

SEQ ID NO: 8784 - DNA, 16 bp, Homo sapiens
ccagcgaggtgacagc

SEQ ID NO: 8785 - DNA, 20 bp, Homo sapiens
ccagcgcgcagaacttgggg

SEQ ID NO: 8786 - DNA, 17 bp, Homo sapiens
ccagcggagggagactg

SEQ ID NO: 8787 - DNA, 16 bp, Homo sapiens
ccagcggagggtggaa

SEQ ID NO: 8788 - DNA, 16 bp, Homo sapiens
ccagcggagtaggggc

SEQ ID NO: 8789 - DNA, 17 bp, Homo sapiens
ccagcggagtaggggct

SEQ ID NO: 8790 - DNA, 18 bp, Homo sapiens
ccagcggagtaggggctg

SEQ ID NO: 8791 - DNA, 19 bp, Homo sapiens
ccagcggagtaggggctgc

SEQ ID NO: 8792 - DNA, 17 bp, Homo sapiens
ccagcgggaccagaggg

SEQ ID NO: 8793 - DNA, 16 bp, Homo sapiens
ccagcgggagaacgat

SEQ ID NO: 8794 - DNA, 18 bp, Homo sapiens
ccagcgggagaacgataa

SEQ ID NO: 8795 - DNA, 20 bp, Homo sapiens
ccagcgggagaacgataatg

SEQ ID NO: 8796 - DNA, 17 bp, Homo sapiens
ccagcggtgcttctagg

SEQ ID NO: 8797 - DNA, 18 bp, Homo sapiens
ccagcggtggcggagcga

SEQ ID NO: 8798 - DNA, 20 bp, Homo sapiens
ccagcgtcgccgcgatggtg

SEQ ID NO: 8799 - DNA, 17 bp, Homo sapiens
ccagctcaggatgagga

SEQ ID NO: 8800 - DNA, 18 bp, Homo sapiens
ccagcttgtcgctctttc

SEQ ID NO: 8801 - DNA, 20 bp, Homo sapiens
ccagcttgtcgctctttccc

SEQ ID NO: 8802 - DNA, 18 bp, Homo sapiens
ccaggaactctaggtgga

SEQ ID NO: 8803 - DNA, 18 bp, Homo sapiens
ccaggaaggaaggacgcg

SEQ ID NO: 8804 - DNA, 20 bp, Homo sapiens
ccaggacaccgtcgccttcc

SEQ ID NO: 8805 - DNA, 21 bp, Homo sapiens
ccaggactcagcccacggccc

SEQ ID NO: 8806 - DNA, 17 bp, Homo sapiens
ccaggactccaaaatgg

SEQ ID NO: 8807 - DNA, 18 bp, Homo sapiens
ccaggagaactcgcgaca

SEQ ID NO: 8808 - DNA, 22 bp, Homo sapiens
ccaggagctcagagctccacat

SEQ ID NO: 8809 - DNA, 18 bp, Homo sapiens
ccaggaggaaggtgggtc

SEQ ID NO: 8810 - DNA, 18 bp, Homo sapiens
ccaggagttaagctgagg

SEQ ID NO: 8811 - DNA, 17 bp, Homo sapiens
ccaggatggcgactccg

SEQ ID NO: 8812 - DNA, 18 bp, Homo sapiens
ccaggatggtgatccgtg

SEQ ID NO: 8813 - DNA, 17 bp, Homo sapiens
ccaggattagacagaag

SEQ ID NO: 8814 - DNA, 18 bp, Homo sapiens
ccaggcatgaaccaaggt

SEQ ID NO: 8815 - DNA, 18 bp, Homo sapiens
ccaggcccgcgccgccag

SEQ ID NO: 8816 - DNA, 18 bp, Homo sapiens
ccaggccgaaccgcagct

SEQ ID NO: 8817 - DNA, 16 bp, Homo sapiens
ccaggccgggagccga

SEQ ID NO: 8818 - DNA, 20 bp, Homo sapiens
ccaggcctggagcggggaca

SEQ ID NO: 8819 - DNA, 18 bp, Homo sapiens
ccaggcgcccgaaaggtg

SEQ ID NO: 8820 - DNA, 19 bp, Homo sapiens
ccaggcgcccgaaaggtga

SEQ ID NO: 8821 - DNA, 17 bp, Homo sapiens
ccaggcgtcccggggcg

SEQ ID NO: 8822 - DNA, 19 bp, Homo sapiens
ccaggctaaactcagaagt

SEQ ID NO: 8823 - DNA, 21 bp, Homo sapiens
ccaggctaagcgccgcgcgca

SEQ ID NO: 8824 - DNA, 18 bp, Homo sapiens
ccaggctcggctgcggcg

SEQ ID NO: 8825 - DNA, 20 bp, Homo sapiens
ccaggctgagaagggtgata

SEQ ID NO: 8826 - DNA, 18 bp, Homo sapiens
ccaggctgaggagtgcgt

SEQ ID NO: 8827 - DNA, 17 bp, Homo sapiens
ccaggctgcggagcgga

SEQ ID NO: 8828 - DNA, 18 bp, Homo sapiens
ccaggctgcggagcggac

SEQ ID NO: 8829 - DNA, 21 bp, Homo sapiens
ccaggctgcggagcggacgga

SEQ ID NO: 8830 - DNA, 21 bp, Homo sapiens
ggcggctgcgagggcggccga

SEQ ID NO: 8831 - DNA, 18 bp, Homo sapiens
ggcggctgcgcagagggc

SEQ ID NO: 8832 - DNA, 18 bp, Homo sapiens
ggcggctggacggacccc

SEQ ID NO: 8833 - DNA, 17 bp, Homo sapiens
ggcggctggccaggagc

SEQ ID NO: 8834 - DNA, 18 bp, Homo sapiens
ggcggctgtggcggagga

SEQ ID NO: 8835 - DNA, 20 bp, Homo sapiens
ggcgggaaaggcgatgagta

SEQ ID NO: 8836 - DNA, 16 bp, Homo sapiens
ggcgggaagcgagccg

SEQ ID NO: 8837 - DNA, 18 bp, Homo sapiens
ggcgggacagacgggcgc

SEQ ID NO: 8838 - DNA, 20 bp, Homo sapiens
ggcgggaccgacggtgtgtg

SEQ ID NO: 8839 - DNA, 18 bp, Homo sapiens
ggcgggagcagcggggca

SEQ ID NO: 8840 - DNA, 18 bp, Homo sapiens
ggcgggagccgcccgttc

SEQ ID NO: 8841 - DNA, 18 bp, Homo sapiens
ggcgggaggatactgctt

SEQ ID NO: 8842 - DNA, 18 bp, Homo sapiens
ggcgggcagtgatggcgg

SEQ ID NO: 8843 - DNA, 23 bp, Homo sapiens
ggcgggccagggtgcggagccgc

SEQ ID NO: 8844 - DNA, 21 bp, Homo sapiens
ggcgggcgcaggcgtttcctc

SEQ ID NO: 8845 - DNA, 16 bp, Homo sapiens
ggcgggcgtcgcggcc

SEQ ID NO: 8846 - DNA, 18 bp, Homo sapiens
ggcgggcgtctgttctag

SEQ ID NO: 8847 - DNA, 17 bp, Homo sapiens
ggcgggcgtgccagtcc

SEQ ID NO: 8848 - DNA, 20 bp, Homo sapiens
ggcgggcgtggacgagccgg

SEQ ID NO: 8849 - DNA, 18 bp, Homo sapiens
ggcgggctctctgacgaa

SEQ ID NO: 8850 - DNA, 18 bp, Homo sapiens
ggcggggaagagagactg

SEQ ID NO: 8851 - DNA, 18 bp, Homo sapiens
ggcggggagcggtgccgg

SEQ ID NO: 8852 - DNA, 16 bp, Homo sapiens
ggcggggaggagcagc

SEQ ID NO: 8853 - DNA, 18 bp, Homo sapiens
ggcggggcctttgtctct

SEQ ID NO: 8854 - DNA, 18 bp, Homo sapiens
ggcggggcggagtccgga

SEQ ID NO: 8855 - DNA, 22 bp, Homo sapiens
ggcggggcggagtccggacgtc

SEQ ID NO: 8856 - DNA, 22 bp, Homo sapiens
ggcggggggtgggaacaggccg

SEQ ID NO: 8857 - DNA, 17 bp, Homo sapiens
ggcgggggtaagcgcgg

SEQ ID NO: 8858 - DNA, 18 bp, Homo sapiens
ggcggggtccggcccgcg

SEQ ID NO: 8859 - DNA, 20 bp, Homo sapiens
ggcggggtcgactgacggta

SEQ ID NO: 8860 - DNA, 23 bp, Homo sapiens
ggcggggtgagttgagaacgcgg

SEQ ID NO: 8861 - DNA, 18 bp, Homo sapiens
ggcggtagcagtggcaac

SEQ ID NO: 8862 - DNA, 19 bp, Homo sapiens
ggcggtagcagtggcaacg

SEQ ID NO: 8863 - DNA, 16 bp, Homo sapiens
ggcggtagcggaggtg

SEQ ID NO: 8864 - DNA, 19 bp, Homo sapiens
ggcggtagcgtgaaacttg

SEQ ID NO: 8865 - DNA, 18 bp, Homo sapiens
ggcggtccgagctgtggc

SEQ ID NO: 8866 - DNA, 19 bp, Homo sapiens
ggcggtctccgtttgtttg

SEQ ID NO: 8867 - DNA, 18 bp, Homo sapiens
ggcggtgcggagcatttc

SEQ ID NO: 8868 - DNA, 19 bp, Homo sapiens
ggcggtgctctgagaagcc

SEQ ID NO: 8869 - DNA, 17 bp, Homo sapiens
ggcggtgctggtttttc

SEQ ID NO: 8870 - DNA, 23 bp, Homo sapiens
ggcggtggcctttgttggctgca

SEQ ID NO: 8871 - DNA, 17 bp, Homo sapiens
ggcggttcggacggctg

SEQ ID NO: 8872 - DNA, 18 bp, Homo sapiens
ggcggttggaggaacggc

SEQ ID NO: 8873 - DNA, 19 bp, Homo sapiens
ggcgtattctagattgacg

SEQ ID NO: 8874 - DNA, 19 bp, Homo sapiens
ggcgtccgaggcaacaaga

SEQ ID NO: 8875 - DNA, 17 bp, Homo sapiens
ggcgtcgcggccgcccc

SEQ ID NO: 8876 - DNA, 18 bp, Homo sapiens
ggcgtcgcggccgccccc

SEQ ID NO: 8877 - DNA, 20 bp, Homo sapiens
ggcgtcgggatgcagcgccc

SEQ ID NO: 8878 - DNA, 21 bp, Homo sapiens
ggcgtctgggtgtgcggagcg

SEQ ID NO: 8879 - DNA, 17 bp, Homo sapiens
ggcgtgcgtgccgccgt

SEQ ID NO: 8880 - DNA, 16 bp, Homo sapiens
ggcgtggccgcacaga

SEQ ID NO: 8881 - DNA, 18 bp, Homo sapiens
ggcgtgtgagcttggttg

SEQ ID NO: 8882 - DNA, 20 bp, Homo sapiens
ggcgtttgctgactggaaaa

SEQ ID NO: 8883 - DNA, 19 bp, Homo sapiens
ggctaagaagagagaggca

SEQ ID NO: 8884 - DNA, 17 bp, Homo sapiens
ggctaagcaaggctgac

SEQ ID NO: 8885 - DNA, 18 bp, Homo sapiens
ggctaagtttttcaccta

SEQ ID NO: 8886 - DNA, 24 bp, Homo sapiens
ggctagagcccgacggggcccggc

SEQ ID NO: 8887 - DNA, 21 bp, Homo sapiens
ccaggctgcggccgcaaggtg

SEQ ID NO: 8888 - DNA, 18 bp, Homo sapiens
ccaggctgcgggacgcgg

SEQ ID NO: 8889 - DNA, 16 bp, Homo sapiens
ccaggctttggcgctg

SEQ ID NO: 8890 - DNA, 19 bp, Homo sapiens
ccagggactgtcggaggtg

SEQ ID NO: 8891 - DNA, 18 bp, Homo sapiens
ccagggagaaggaacttg

SEQ ID NO: 8892 - DNA, 18 bp, Homo sapiens
ccagggcaaagcagagta

SEQ ID NO: 8893 - DNA, 18 bp, Homo sapiens
ccagggcgaacggacgga

SEQ ID NO: 8894 - DNA, 22 bp, Homo sapiens
ccaggggcgttgggaacggttg

SEQ ID NO: 8895 - DNA, 18 bp, Homo sapiens
ccagggtgcgctaccgga

SEQ ID NO: 8896 - DNA, 18 bp, Homo sapiens
ccaggtgaggagtaggga

SEQ ID NO: 8897 - DNA, 18 bp, Homo sapiens
ccaggtggactcggagtc

SEQ ID NO: 8898 - DNA, 16 bp, Homo sapiens
ccagtatgtctggacg

SEQ ID NO: 8899 - DNA, 19 bp, Homo sapiens
ccagtatgtctggacgtgg

SEQ ID NO: 8900 - DNA, 18 bp, Homo sapiens
ccagtccctgggtcgggc

SEQ ID NO: 8901 - DNA, 18 bp, Homo sapiens
ccagtgcgggcgcagcgg

SEQ ID NO: 8902 - DNA, 16 bp, Homo sapiens
ccagtggctcgcaagc

SEQ ID NO: 8903 - DNA, 17 bp, Homo sapiens
ccagtggctgaccgcct

SEQ ID NO: 8904 - DNA, 18 bp, Homo sapiens
ccagttccgtctgtgtgt

SEQ ID NO: 8905 - DNA, 20 bp, Homo sapiens
ccagttcctttgcggtcctc

SEQ ID NO: 8906 - DNA, 22 bp, Homo sapiens
ccagttctggcctttggggttc

SEQ ID NO: 8907 - DNA, 18 bp, Homo sapiens
ccagttgcttcggctccc

SEQ ID NO: 8908 - DNA, 18 bp, Homo sapiens
ccagttggccgggcacgg

SEQ ID NO: 8909 - DNA, 23 bp, Homo sapiens
ccagttggctgcgaccagcggtg

SEQ ID NO: 8910 - DNA, 17 bp, Homo sapiens
ccagtttgttaggactg

SEQ ID NO: 8911 - DNA, 18 bp, Homo sapiens
ccagtttgttaggactgc

SEQ ID NO: 8912 - DNA, 18 bp, Homo sapiens
ccataagatggcgtccgt

SEQ ID NO: 8913 - DNA, 18 bp, Homo sapiens
ccatcccagaagctgctg

SEQ ID NO: 8914 - DNA, 16 bp, Homo sapiens
ccatcccgctcgctcc

SEQ ID NO: 8915 - DNA, 23 bp, Homo sapiens
ccatcccggcggctaaggagagc

SEQ ID NO: 8916 - DNA, 18 bp, Homo sapiens
ccatcgtgggcagcggac

SEQ ID NO: 8917 - DNA, 18 bp, Homo sapiens
ccatcttgtctgtatccg

SEQ ID NO: 8918 - DNA, 18 bp, Homo sapiens
ccatcttgtttgtttgag

SEQ ID NO: 8919 - DNA, 18 bp, Homo sapiens
ccatgaggcgccggtaag

SEQ ID NO: 8920 - DNA, 19 bp, Homo sapiens
ccatgaggtgagttggtcc

SEQ ID NO: 8921 - DNA, 20 bp, Homo sapiens
ccatgctgcgctggggctgc

SEQ ID NO: 8922 - DNA, 19 bp, Homo sapiens
ccatggacagctcggccgt

SEQ ID NO: 8923 - DNA, 18 bp, Homo sapiens
ccatggagctggaggtac

SEQ ID NO: 8924 - DNA, 18 bp, Homo sapiens
ccatggagggtcaacgct

SEQ ID NO: 8925 - DNA, 22 bp, Homo sapiens
ccatggcccagtggaggaagaa

SEQ ID NO: 8926 - DNA, 17 bp, Homo sapiens
ccatggccgagagcgac

SEQ ID NO: 8927 - DNA, 22 bp, Homo sapiens
ccatggccggcatggtggactt

SEQ ID NO: 8928 - DNA, 21 bp, Homo sapiens
ccatggccggcctgtcggacc

SEQ ID NO: 8929 - DNA, 18 bp, Homo sapiens
ccatggcttccggttctt

SEQ ID NO: 8930 - DNA, 18 bp, Homo sapiens
ccatgggggtggcggggc

SEQ ID NO: 8931 - DNA, 21 bp, Homo sapiens
ccatgtcgggctcgttcgagc

SEQ ID NO: 8932 - DNA, 18 bp, Homo sapiens
ccattaccgcccctcggg

SEQ ID NO: 8933 - DNA, 22 bp, Homo sapiens
ccattcagtgcacgcgttactt

SEQ ID NO: 8934 - DNA, 19 bp, Homo sapiens
ccattcctagttaaggcgg

SEQ ID NO: 8935 - DNA, 18 bp, Homo sapiens
ccattcttaaaggcgccc

SEQ ID NO: 8936 - DNA, 19 bp, Homo sapiens
ccattgcctcgtgcccgcg

SEQ ID NO: 8937 - DNA, 19 bp, Homo sapiens
ccatttacccgacccgacg

SEQ ID NO: 8938 - DNA, 20 bp, Homo sapiens
ccatttcagggagcttgtcg

SEQ ID NO: 8939 - DNA, 18 bp, Homo sapiens
ccattttgcgggaagagg

SEQ ID NO: 8940 - DNA, 19 bp, Homo sapiens
ccattttgcgggaagagga

SEQ ID NO: 8941 - DNA, 18 bp, Homo sapiens
ccattttgggactgagac

SEQ ID NO: 8942 - DNA, 19 bp, Homo sapiens
ccattttggtgcgagagaa

SEQ ID NO: 8943 - DNA, 18 bp, Homo sapiens
ccattttgtaaggttctc

SEQ ID NO: 8944 - DNA, 18 bp, Homo sapiens
ggctaggctctgggattc

SEQ ID NO: 8945 - DNA, 18 bp, Homo sapiens
ggctatggcggccacgtt

SEQ ID NO: 8946 - DNA, 18 bp, Homo sapiens
ggctcacagcggtggcaa

SEQ ID NO: 8947 - DNA, 18 bp, Homo sapiens
ggctcagaccgaggcgca

SEQ ID NO: 8948 - DNA, 16 bp, Homo sapiens
ggctcagctggagagg

SEQ ID NO: 8949 - DNA, 19 bp, Homo sapiens
ggctccaggcctcggggac

SEQ ID NO: 8950 - DNA, 17 bp, Homo sapiens
ggctccgcggcctccaa

SEQ ID NO: 8951 - DNA, 16 bp, Homo sapiens
ggctccgggtttggca

SEQ ID NO: 8952 - DNA, 18 bp, Homo sapiens
ggctcctcagctcggggc

SEQ ID NO: 8953 - DNA, 18 bp, Homo sapiens
ggctcctgtacccccggc

SEQ ID NO: 8954 - DNA, 18 bp, Homo sapiens
ggctcgcggcggaaaagt

SEQ ID NO: 8955 - DNA, 18 bp, Homo sapiens
ggctcgctatataaagga

SEQ ID NO: 8956 - DNA, 18 bp, Homo sapiens
ggctcggctcagtcggtc

SEQ ID NO: 8957 - DNA, 18 bp, Homo sapiens
ggctctagtgaacagcgg

SEQ ID NO: 8958 - DNA, 18 bp, Homo sapiens
ggctctctcagggtccaa

SEQ ID NO: 8959 - DNA, 20 bp, Homo sapiens
ggctctctggctggagcttg

SEQ ID NO: 8960 - DNA, 17 bp, Homo sapiens
ggctctgcagagtcgag

SEQ ID NO: 8961 - DNA, 20 bp, Homo sapiens
ggctctgcagagtcgagagt

SEQ ID NO: 8962 - DNA, 18 bp, Homo sapiens
ggctctgctgtgcctcag

SEQ ID NO: 8963 - DNA, 19 bp, Homo sapiens
ggctctggcctgcagctcg

SEQ ID NO: 8964 - DNA, 18 bp, Homo sapiens
ggctctgtgttggttgga

SEQ ID NO: 8965 - DNA, 16 bp, Homo sapiens
ggctcttccggcgcct

SEQ ID NO: 8966 - DNA, 20 bp, Homo sapiens
ggctcttcctcgtagtgccg

SEQ ID NO: 8967 - DNA, 16 bp, Homo sapiens
ggctcttcgggtaaag

SEQ ID NO: 8968 - DNA, 16 bp, Homo sapiens
ggctgagtcgagactg

SEQ ID NO: 8969 - DNA, 17 bp, Homo sapiens
ggctgcacgagcagttc

SEQ ID NO: 8970 - DNA, 22 bp, Homo sapiens
ggctgcgacagcctgggtaaga

SEQ ID NO: 8971 - DNA, 18 bp, Homo sapiens
ggctgcgccgcgtgtcct

SEQ ID NO: 8972 - DNA, 18 bp, Homo sapiens
ggctgcgcgccgccgagg

SEQ ID NO: 8973 - DNA, 22 bp, Homo sapiens
ggctgcgctgggcttgccggga

SEQ ID NO: 8974 - DNA, 19 bp, Homo sapiens
ggctgcggagaggcgggcc

SEQ ID NO: 8975 - DNA, 19 bp, Homo sapiens
ggctgcggccgcaaggtgc

SEQ ID NO: 8976 - DNA, 18 bp, Homo sapiens
ggctgcggcgacggcaga

SEQ ID NO: 8977 - DNA, 23 bp, Homo sapiens
ggctgcggggtgagaggccaggg

SEQ ID NO: 8978 - DNA, 17 bp, Homo sapiens
ggctgcgtgcaggagga

SEQ ID NO: 8979 - DNA, 18 bp, Homo sapiens
ggctgctaaacccaaccg

SEQ ID NO: 8980 - DNA, 18 bp, Homo sapiens
ggctgctttgagacagcc

SEQ ID NO: 8981 - DNA, 19 bp, Homo sapiens
ggctggaccgaaaccggcg

SEQ ID NO: 8982 - DNA, 18 bp, Homo sapiens
ggctggagcagaggcagc

SEQ ID NO: 8983 - DNA, 18 bp, Homo sapiens
ggctggagcgatggcccg

SEQ ID NO: 8984 - DNA, 18 bp, Homo sapiens
ggctggagcggccgctcc

SEQ ID NO: 8985 - DNA, 19 bp, Homo sapiens
ggctggcacccaacgtggg

SEQ ID NO: 8986 - DNA, 23 bp, Homo sapiens
ggctggcacccaacgtgggctgg

SEQ ID NO: 8987 - DNA, 19 bp, Homo sapiens
ggctggcggttccgttagg

SEQ ID NO: 8988 - DNA, 21 bp, Homo sapiens
ggctggcggttccgttaggtc

SEQ ID NO: 8989 - DNA, 23 bp, Homo sapiens
ggctgggctcggtcgggcgctgt

SEQ ID NO: 8990 - DNA, 18 bp, Homo sapiens
ggctggggcaaccaccgc

SEQ ID NO: 8991 - DNA, 18 bp, Homo sapiens
ggctggggcaggttatgg

SEQ ID NO: 8992 - DNA, 23 bp, Homo sapiens
ggctggtcccctgacaggttgaa

SEQ ID NO: 8993 - DNA, 19 bp, Homo sapiens
ggctgtagcctgtgagcag

SEQ ID NO: 8994 - DNA, 19 bp, Homo sapiens
ggctgtctacgtcgggatg

SEQ ID NO: 8995 - DNA, 18 bp, Homo sapiens
ggctgtctgaagatagat

SEQ ID NO: 8996 - DNA, 20 bp, Homo sapiens
ggctgtctgaagatagatcg

SEQ ID NO: 8997 - DNA, 17 bp, Homo sapiens
ggctgtgagtctgcggc

SEQ ID NO: 8998 - DNA, 21 bp, Homo sapiens
ggctgtggctgtggctgcggc

SEQ ID NO: 8999 - DNA, 17 bp, Homo sapiens
ggcttaaggaagtaaaa

SEQ ID NO: 9000 - DNA, 17 bp, Homo sapiens
ggcttagggtagggagg

SEQ ID NO: 9001 - DNA, 18 bp, Homo sapiens
ccattttgtgcagtcgct

SEQ ID NO: 9002 - DNA, 16 bp, Homo sapiens
cccaagatggcggcgc

SEQ ID NO: 9003 - DNA, 21 bp, Homo sapiens
cccaagatggtgagtgagctg

SEQ ID NO: 9004 - DNA, 18 bp, Homo sapiens
cccaatccaaggaggaca

SEQ ID NO: 9005 - DNA, 19 bp, Homo sapiens
cccacaacgagctcgggcc

SEQ ID NO: 9006 - DNA, 18 bp, Homo sapiens
cccacaataccaggcggg

SEQ ID NO: 9007 - DNA, 19 bp, Homo sapiens
cccacaataccaggcggga

SEQ ID NO: 9008 - DNA, 20 bp, Homo sapiens
cccacatggcggcgctcctg

SEQ ID NO: 9009 - DNA, 20 bp, Homo sapiens
cccaccatgaccctcggccg

SEQ ID NO: 9010 - DNA, 21 bp, Homo sapiens
cccacgtggaagcggcactca

SEQ ID NO: 9011 - DNA, 20 bp, Homo sapiens
cccactcccgggatgtgtct

SEQ ID NO: 9012 - DNA, 18 bp, Homo sapiens
cccactgagacgagcgga

SEQ ID NO: 9013 - DNA, 17 bp, Homo sapiens
cccactgcttcttcgct

SEQ ID NO: 9014 - DNA, 20 bp, Homo sapiens
cccacttccgctcctgcgcg

SEQ ID NO: 9015 - DNA, 19 bp, Homo sapiens
cccagaaaggcggcgacgc

SEQ ID NO: 9016 - DNA, 21 bp, Homo sapiens
cccagaagaagggaaggcgcg

SEQ ID NO: 9017 - DNA, 21 bp, Homo sapiens
cccagaaggatgtgcggccga

SEQ ID NO: 9018 - DNA, 18 bp, Homo sapiens
cccagactggtcggagcc

SEQ ID NO: 9019 - DNA, 23 bp, Homo sapiens
cccagagatggatgcagagcgtg

SEQ ID NO: 9020 - DNA, 24 bp, Homo sapiens
cccagagcaagaccctgatggctg

SEQ ID NO: 9021 - DNA, 17 bp, Homo sapiens
cccagagctaccatgag

SEQ ID NO: 9022 - DNA, 21 bp, Homo sapiens
cccagagctgggacagaaggg

SEQ ID NO: 9023 - DNA, 19 bp, Homo sapiens
cccagaggctgctgaggcg

SEQ ID NO: 9024 - DNA, 20 bp, Homo sapiens
cccagaggctgctgaggcgc

SEQ ID NO: 9025 - DNA, 21 bp, Homo sapiens
cccagagggcgagagggcctg

SEQ ID NO: 9026 - DNA, 17 bp, Homo sapiens
cccagagtgcagagccg

SEQ ID NO: 9027 - DNA, 20 bp, Homo sapiens
cccagagttgcgaggagttt

SEQ ID NO: 9028 - DNA, 18 bp, Homo sapiens
cccagatgcgagcactgc

SEQ ID NO: 9029 - DNA, 19 bp, Homo sapiens
cccagcagcggtactctcg

SEQ ID NO: 9030 - DNA, 18 bp, Homo sapiens
cccagcaggcggcgaaga

SEQ ID NO: 9031 - DNA, 17 bp, Homo sapiens
cccagcatagtggtcag

SEQ ID NO: 9032 - DNA, 19 bp, Homo sapiens
cccagccaaactgaaagcc

SEQ ID NO: 9033 - DNA, 20 bp, Homo sapiens
cccagcgcgagttgctgcta

SEQ ID NO: 9034 - DNA, 19 bp, Homo sapiens
cccagcgcgcagaacttgg

SEQ ID NO: 9035 - DNA, 19 bp, Homo sapiens
cccagcggagtaggggctg

SEQ ID NO: 9036 - DNA, 20 bp, Homo sapiens
cccagcggagtaggggctgc

SEQ ID NO: 9037 - DNA, 17 bp, Homo sapiens
cccagcggtgcggagcg

SEQ ID NO: 9038 - DNA, 19 bp, Homo sapiens
cccagctcggaggggccgc

SEQ ID NO: 9039 - DNA, 17 bp, Homo sapiens
cccaggagaccagaaca

SEQ ID NO: 9040 - DNA, 18 bp, Homo sapiens
cccaggagctgggagcgg

SEQ ID NO: 9041 - DNA, 19 bp, Homo sapiens
cccaggagctgggagcggg

SEQ ID NO: 9042 - DNA, 18 bp, Homo sapiens
cccaggaggacgtgtggc

SEQ ID NO: 9043 - DNA, 19 bp, Homo sapiens
cccaggcacaggagactca

SEQ ID NO: 9044 - DNA, 22 bp, Homo sapiens
cccaggccacacagaggccggc

SEQ ID NO: 9045 - DNA, 21 bp, Homo sapiens
cccaggcggcggtggaaaggt

SEQ ID NO: 9046 - DNA, 17 bp, Homo sapiens
cccaggctgcggccgca

SEQ ID NO: 9047 - DNA, 19 bp, Homo sapiens
cccagggcgaacggacgga

SEQ ID NO: 9048 - DNA, 18 bp, Homo sapiens
cccaggggcgagtatccg

SEQ ID NO: 9049 - DNA, 19 bp, Homo sapiens
cccagtagctcctgggaca

SEQ ID NO: 9050 - DNA, 21 bp, Homo sapiens
cccagtatgagggagatcgtg

SEQ ID NO: 9051 - DNA, 21 bp, Homo sapiens
cccagtcggcaccacagcggt

SEQ ID NO: 9052 - DNA, 18 bp, Homo sapiens
cccagtctctgtgcgagg

SEQ ID NO: 9053 - DNA, 19 bp, Homo sapiens
cccagtgcgagagcgcggc

SEQ ID NO: 9054 - DNA, 17 bp, Homo sapiens
cccagtgggccgccatg

SEQ ID NO: 9055 - DNA, 18 bp, Homo sapiens
cccagtgggccgtagggg

SEQ ID NO: 9056 - DNA, 17 bp, Homo sapiens
cccagtgttctggcagg

SEQ ID NO: 9057 - DNA, 18 bp, Homo sapiens
cccagttgcaccacgagc

SEQ ID NO: 9058 - DNA, 18 bp, Homo sapiens
ggcttcgtttacagttcg

SEQ ID NO: 9059 - DNA, 19 bp, Homo sapiens
ggcttcgtttacagttcgg

SEQ ID NO: 9060 - DNA, 19 bp, Homo sapiens
ggcttctgatgggtctctg

SEQ ID NO: 9061 - DNA, 18 bp, Homo sapiens
ggcttctgcagcagccga

SEQ ID NO: 9062 - DNA, 18 bp, Homo sapiens
ggcttctggactgcgcga

SEQ ID NO: 9063 - DNA, 18 bp, Homo sapiens
ggcttctgggcggaaggt

SEQ ID NO: 9064 - DNA, 19 bp, Homo sapiens
ggcttgactgggaaggtca

SEQ ID NO: 9065 - DNA, 18 bp, Homo sapiens
ggcttgcgccagctcagg

SEQ ID NO: 9066 - DNA, 18 bp, Homo sapiens
ggcttggagcgggtctag

SEQ ID NO: 9067 - DNA, 17 bp, Homo sapiens
ggcttgtttcctgaacg

SEQ ID NO: 9068 - DNA, 18 bp, Homo sapiens
ggctttctgagttgggtg

SEQ ID NO: 9069 - DNA, 18 bp, Homo sapiens
ggctttgggcgcgagtgg

SEQ ID NO: 9070 - DNA, 21 bp, Homo sapiens
ggctttgttgggtgagcttgt

SEQ ID NO: 9071 - DNA, 20 bp, Homo sapiens
ggcttttgcagccggagccg

SEQ ID NO: 9072 - DNA, 19 bp, Homo sapiens
ggctttttggaggtgtctc

SEQ ID NO: 9073 - DNA, 17 bp, Homo sapiens
gggaaaaggggaaacgg

SEQ ID NO: 9074 - DNA, 18 bp, Homo sapiens
gggaaaggacggggagtg

SEQ ID NO: 9075 - DNA, 18 bp, Homo sapiens
gggaaaggcgatgagtaa

SEQ ID NO: 9076 - DNA, 17 bp, Homo sapiens
gggaaagggaagcggac

SEQ ID NO: 9077 - DNA, 16 bp, Homo sapiens
gggaacaaaggagcgg

SEQ ID NO: 9078 - DNA, 17 bp, Homo sapiens
gggaacaggcatggacg

SEQ ID NO: 9079 - DNA, 17 bp, Homo sapiens
gggaacaggtggggaca

SEQ ID NO: 9080 - DNA, 18 bp, Homo sapiens
gggaactagtcggacctc

SEQ ID NO: 9081 - DNA, 18 bp, Homo sapiens
gggaagacgcagccacct

SEQ ID NO: 9082 - DNA, 19 bp, Homo sapiens
gggaagcaggaagtgactg

SEQ ID NO: 9083 - DNA, 18 bp, Homo sapiens
gggaagccatcggacgtc

SEQ ID NO: 9084 - DNA, 19 bp, Homo sapiens
gggaagcgttacttgaggc

SEQ ID NO: 9085 - DNA, 23 bp, Homo sapiens
gggaaggagatgaacgagattaa

SEQ ID NO: 9086 - DNA, 16 bp, Homo sapiens
gggaaggcagctgaac

SEQ ID NO: 9087 - DNA, 19 bp, Homo sapiens
gggaaggtaaagcggcgac

SEQ ID NO: 9088 - DNA, 17 bp, Homo sapiens
gggaaggtaggtaacgg

SEQ ID NO: 9089 - DNA, 19 bp, Homo sapiens
gggaaggtgaggatctgcg

SEQ ID NO: 9090 - DNA, 23 bp, Homo sapiens
gggaagttggcaacaggaagtga

SEQ ID NO: 9091 - DNA, 20 bp, Homo sapiens
gggaatctgaaaccatctgc

SEQ ID NO: 9092 - DNA, 20 bp, Homo sapiens
gggaatggcggagggaggta

SEQ ID NO: 9093 - DNA, 17 bp, Homo sapiens
gggacaagaaacagggg

SEQ ID NO: 9094 - DNA, 18 bp, Homo sapiens
gggacaagaaacaggggg

SEQ ID NO: 9095 - DNA, 20 bp, Homo sapiens
gggacaagaaacagggggtc

SEQ ID NO: 9096 - DNA, 17 bp, Homo sapiens
gggacaccgagggaaga

SEQ ID NO: 9097 - DNA, 18 bp, Homo sapiens
gggacacttcggtcctga

SEQ ID NO: 9098 - DNA, 18 bp, Homo sapiens
gggacagacgcaggccag

SEQ ID NO: 9099 - DNA, 19 bp, Homo sapiens
gggacagacgggcgcacgc

SEQ ID NO: 9100 - DNA, 18 bp, Homo sapiens
gggacagagatggcactg

SEQ ID NO: 9101 - DNA, 20 bp, Homo sapiens
gggacagctggagacagtgg

SEQ ID NO: 9102 - DNA, 24 bp, Homo sapiens
gggacaggagccgaggcgcggcag

SEQ ID NO: 9103 - DNA, 18 bp, Homo sapiens
gggacagggacaagcata

SEQ ID NO: 9104 - DNA, 18 bp, Homo sapiens
gggacagggacaagcgta

SEQ ID NO: 9105 - DNA, 17 bp, Homo sapiens
gggacagggcgaagcgg

SEQ ID NO: 9106 - DNA, 18 bp, Homo sapiens
gggacagggcgaagcggc

SEQ ID NO: 9107 - DNA, 17 bp, Homo sapiens
gggacagttagggcggc

SEQ ID NO: 9108 - DNA, 18 bp, Homo sapiens
gggacagttgggtaagga

SEQ ID NO: 9109 - DNA, 18 bp, Homo sapiens
gggaccatggagccggtg

SEQ ID NO: 9110 - DNA, 20 bp, Homo sapiens
gggaccctacgaaccaggag

SEQ ID NO: 9111 - DNA, 18 bp, Homo sapiens
gggaccgcgagcacaggc

SEQ ID NO: 9112 - DNA, 24 bp, Homo sapiens
gggaccgcgagcacaggccgctcc

SEQ ID NO: 9113 - DNA, 18 bp, Homo sapiens
gggaccggtgagtgtcgc

SEQ ID NO: 9114 - DNA, 18 bp, Homo sapiens
gggaccggtgggcgacgg

SEQ ID NO: 9115 - DNA, 18 bp, Homo sapiens
cccatacctcggccatgc

SEQ ID NO: 9116 - DNA, 16 bp, Homo sapiens
cccatcttgcaaggta

SEQ ID NO: 9117 - DNA, 22 bp, Homo sapiens
cccatggcgaagagggctcagg

SEQ ID NO: 9118 - DNA, 18 bp, Homo sapiens
ccccaacgtgaagtacta

SEQ ID NO: 9119 - DNA, 16 bp, Homo sapiens
ccccacgagcaggaac

SEQ ID NO: 9120 - DNA, 19 bp, Homo sapiens
ccccactcccacctccatg

SEQ ID NO: 9121 - DNA, 20 bp, Homo sapiens
ccccagaggcggaagtaaaa

SEQ ID NO: 9122 - DNA, 19 bp, Homo sapiens
ccccagagtgaggaggacg

SEQ ID NO: 9123 - DNA, 18 bp, Homo sapiens
ccccagccagcgccgccg

SEQ ID NO: 9124 - DNA, 17 bp, Homo sapiens
ccccagcggccgctgcg

SEQ ID NO: 9125 - DNA, 17 bp, Homo sapiens
ccccaggctgcggccgc

SEQ ID NO: 9126 - DNA, 24 bp, Homo sapiens
ccccaggctgcggccgcaaggtgc

SEQ ID NO: 9127 - DNA, 17 bp, Homo sapiens
ccccagggctgcttttc

SEQ ID NO: 9128 - DNA, 18 bp, Homo sapiens
ccccagtcctgcacacaa

SEQ ID NO: 9129 - DNA, 18 bp, Homo sapiens
ccccatacctcggccatg

SEQ ID NO: 9130 - DNA, 19 bp, Homo sapiens
ccccatccttagattcgct

SEQ ID NO: 9131 - DNA, 17 bp, Homo sapiens
cccccaaggggtcggcc

SEQ ID NO: 9132 - DNA, 18 bp, Homo sapiens
ccccccttcggccgcggc

SEQ ID NO: 9133 - DNA, 22 bp, Homo sapiens
cccccgccgccagctcgcctca

SEQ ID NO: 9134 - DNA, 18 bp, Homo sapiens
cccccggcgcggggagaa

SEQ ID NO: 9135 - DNA, 18 bp, Homo sapiens
cccccggtaccctcgctc

SEQ ID NO: 9136 - DNA, 17 bp, Homo sapiens
ccccctcaggaatggag

SEQ ID NO: 9137 - DNA, 18 bp, Homo sapiens
ccccgaaggctatttcgc

SEQ ID NO: 9138 - DNA, 19 bp, Homo sapiens
ccccgacagccgacagtca

SEQ ID NO: 9139 - DNA, 18 bp, Homo sapiens
ccccgactcaacgtgaga

SEQ ID NO: 9140 - DNA, 20 bp, Homo sapiens
ccccgccacttgattctgga

SEQ ID NO: 9141 - DNA, 17 bp, Homo sapiens
ccccgccccgcccggtc

SEQ ID NO: 9142 - DNA, 23 bp, Homo sapiens
ccccgcctgcccttcctcgccac

SEQ ID NO: 9143 - DNA, 15 bp, Homo sapiens
ccccgcgagggggcc

SEQ ID NO: 9144 - DNA, 18 bp, Homo sapiens
ccccgcgcccccgcagca

SEQ ID NO: 9145 - DNA, 18 bp, Homo sapiens
ccccgcggacccgggctg

SEQ ID NO: 9146 - DNA, 20 bp, Homo sapiens
ccccgcggtgctgacatccc

SEQ ID NO: 9147 - DNA, 16 bp, Homo sapiens
ccccgctggaccctgc

SEQ ID NO: 9148 - DNA, 17 bp, Homo sapiens
ccccggaaaaaatttcc

SEQ ID NO: 9149 - DNA, 19 bp, Homo sapiens
ccccggacaggaggcagtg

SEQ ID NO: 9150 - DNA, 16 bp, Homo sapiens
ccccggacgaaggtac

SEQ ID NO: 9151 - DNA, 18 bp, Homo sapiens
ccccggaggccgaggggt

SEQ ID NO: 9152 - DNA, 18 bp, Homo sapiens
ccccggcaccagaagttc

SEQ ID NO: 9153 - DNA, 18 bp, Homo sapiens
ccccggcaggaccaaccc

SEQ ID NO: 9154 - DNA, 18 bp, Homo sapiens
ccccggccacaggcctgt

SEQ ID NO: 9155 - DNA, 18 bp, Homo sapiens
ccccggcgcggagcaggc

SEQ ID NO: 9156 - DNA, 18 bp, Homo sapiens
ccccggcggctgagaggc

SEQ ID NO: 9157 - DNA, 18 bp, Homo sapiens
ccccggcggttagtgctg

SEQ ID NO: 9158 - DNA, 21 bp, Homo sapiens
ccccgggagctggctgaggcg

SEQ ID NO: 9159 - DNA, 19 bp, Homo sapiens
ccccgggccaggctcgctg

SEQ ID NO: 9160 - DNA, 20 bp, Homo sapiens
ccccgggccaggctcgctgc

SEQ ID NO: 9161 - DNA, 16 bp, Homo sapiens
ccccgtgagggaagcg

SEQ ID NO: 9162 - DNA, 20 bp, Homo sapiens
ccccgtggcgcccgagtgca

SEQ ID NO: 9163 - DNA, 18 bp, Homo sapiens
ccccgtggtctgagtttg

SEQ ID NO: 9164 - DNA, 18 bp, Homo sapiens
cccctagtgcggtgttgc

SEQ ID NO: 9165 - DNA, 19 bp, Homo sapiens
cccctccaccacagagccg

SEQ ID NO: 9166 - DNA, 20 bp, Homo sapiens
cccctcctcgtcgggaagaa

SEQ ID NO: 9167 - DNA, 18 bp, Homo sapiens
cccctcggaacaactgta

SEQ ID NO: 9168 - DNA, 18 bp, Homo sapiens
cccctcgggggcggctgt

SEQ ID NO: 9169 - DNA, 19 bp, Homo sapiens
cccctgcgggtgctggagc

SEQ ID NO: 9170 - DNA, 17 bp, Homo sapiens
cccctgggctgggggcg

SEQ ID NO: 9171 - DNA, 16 bp, Homo sapiens
ccccttctctgtgtca

SEQ ID NO: 9172 - DNA, 21 bp, Homo sapiens
gggaccggtgtctggcggatg

SEQ ID NO: 9173 - DNA, 18 bp, Homo sapiens
gggacctagctcgggacc

SEQ ID NO: 9174 - DNA, 16 bp, Homo sapiens
gggaccttgagagcgg

SEQ ID NO: 9175 - DNA, 17 bp, Homo sapiens
gggaccttgagagcggc

SEQ ID NO: 9176 - DNA, 18 bp, Homo sapiens
gggaccttgagagcggcc

SEQ ID NO: 9177 - DNA, 19 bp, Homo sapiens
gggaccttgagagcggcca

SEQ ID NO: 9178 - DNA, 20 bp, Homo sapiens
gggaccttgagagcggccag

SEQ ID NO: 9179 - DNA, 19 bp, Homo sapiens
gggacgatgatgattggta

SEQ ID NO: 9180 - DNA, 20 bp, Homo sapiens
gggacgatggcgggacgggt

SEQ ID NO: 9181 - DNA, 21 bp, Homo sapiens
gggacgcgtcagccaggcacc

SEQ ID NO: 9182 - DNA, 20 bp, Homo sapiens
gggacgctgggctgagcggc

SEQ ID NO: 9183 - DNA, 15 bp, Homo sapiens
gggacggacggtgga

SEQ ID NO: 9184 - DNA, 18 bp, Homo sapiens
gggacggagccaagatgg

SEQ ID NO: 9185 - DNA, 17 bp, Homo sapiens
gggacggagcttggctg

SEQ ID NO: 9186 - DNA, 18 bp, Homo sapiens
gggacgggggcgagagtg

SEQ ID NO: 9187 - DNA, 18 bp, Homo sapiens
gggacggtaagcgatcgc

SEQ ID NO: 9188 - DNA, 19 bp, Homo sapiens
gggacgtaacggaggcagg

SEQ ID NO: 9189 - DNA, 19 bp, Homo sapiens
gggactagcagcgaatatg

SEQ ID NO: 9190 - DNA, 18 bp, Homo sapiens
gggactagcaggtgggtt

SEQ ID NO: 9191 - DNA, 18 bp, Homo sapiens
gggactcagcgccagtga

SEQ ID NO: 9192 - DNA, 22 bp, Homo sapiens
gggactcaggcctgcctgcgaa

SEQ ID NO: 9193 - DNA, 21 bp, Homo sapiens
gggactcccaggaccacaggc

SEQ ID NO: 9194 - DNA, 18 bp, Homo sapiens
gggactccggggcgaccg

SEQ ID NO: 9195 - DNA, 20 bp, Homo sapiens
gggactcggcccagaagccg

SEQ ID NO: 9196 - DNA, 18 bp, Homo sapiens
gggactcggcggcatggc

SEQ ID NO: 9197 - DNA, 19 bp, Homo sapiens
gggactcggcggcatggcg

SEQ ID NO: 9198 - DNA, 19 bp, Homo sapiens
gggactcttcctggagaca

SEQ ID NO: 9199 - DNA, 17 bp, Homo sapiens
gggactgctaaggaaga

SEQ ID NO: 9200 - DNA, 19 bp, Homo sapiens
gggacttagagaaggcaga

SEQ ID NO: 9201 - DNA, 17 bp, Homo sapiens
gggacttgccgatagtg

SEQ ID NO: 9202 - DNA, 18 bp, Homo sapiens
gggagaaagcctgttgcg

SEQ ID NO: 9203 - DNA, 18 bp, Homo sapiens
gggagaaagtcgcgtccg

SEQ ID NO: 9204 - DNA, 18 bp, Homo sapiens
gggagaagagcggagcag

SEQ ID NO: 9205 - DNA, 18 bp, Homo sapiens
gggagacaagatccgatc

SEQ ID NO: 9206 - DNA, 20 bp, Homo sapiens
gggagacagcgcagtttgaa

SEQ ID NO: 9207 - DNA, 18 bp, Homo sapiens
gggagacgagaagcctga

SEQ ID NO: 9208 - DNA, 19 bp, Homo sapiens
gggagagcgcgggccgcgc

SEQ ID NO: 9209 - DNA, 16 bp, Homo sapiens
gggagagcggctggat

SEQ ID NO: 9210 - DNA, 21 bp, Homo sapiens
gggagagcgggcagccttcca

SEQ ID NO: 9211 - DNA, 22 bp, Homo sapiens
gggagattcaccaggactgggc

SEQ ID NO: 9212 - DNA, 18 bp, Homo sapiens
gggagccgcgcgggaccc

SEQ ID NO: 9213 - DNA, 17 bp, Homo sapiens
gggagccgctgctctcc

SEQ ID NO: 9214 - DNA, 19 bp, Homo sapiens
gggagccggagatggagtc

SEQ ID NO: 9215 - DNA, 21 bp, Homo sapiens
gggagccggggagtgggccag

SEQ ID NO: 9216 - DNA, 17 bp, Homo sapiens
gggagccggtccgccgc

SEQ ID NO: 9217 - DNA, 20 bp, Homo sapiens
gggagcgactagacgaacag

SEQ ID NO: 9218 - DNA, 16 bp, Homo sapiens
gggagcgccgcgtggg

SEQ ID NO: 9219 - DNA, 16 bp, Homo sapiens
gggagcgcgagcccgc

SEQ ID NO: 9220 - DNA, 23 bp, Homo sapiens
gggagcgcggccctgactcgtgc

SEQ ID NO: 9221 - DNA, 16 bp, Homo sapiens
gggagcggacttacct

SEQ ID NO: 9222 - DNA, 22 bp, Homo sapiens
gggagcggagtgggtcgggcgg

SEQ ID NO: 9223 - DNA, 18 bp, Homo sapiens
gggagcggggaaaacaaa

SEQ ID NO: 9224 - DNA, 18 bp, Homo sapiens
gggagctaggcgcgaggc

SEQ ID NO: 9225 - DNA, 18 bp, Homo sapiens
gggagctgagcctagagt

SEQ ID NO: 9226 - DNA, 17 bp, Homo sapiens
gggagctgcccctaacc

SEQ ID NO: 9227 - DNA, 19 bp, Homo sapiens
gggagctgggggaaacgac

SEQ ID NO: 9228 - DNA, 19 bp, Homo sapiens
gggaggaccggaggaccga

SEQ ID NO: 9229 - DNA, 22 bp, Homo sapiens
ccccttcttccccaagatccag

SEQ ID NO: 9230 - DNA, 18 bp, Homo sapiens
ccccttgccagtctttcg

SEQ ID NO: 9231 - DNA, 20 bp, Homo sapiens
cccctttctttttgaggaag

SEQ ID NO: 9232 - DNA, 18 bp, Homo sapiens
cccgaaagagggtaggtg

SEQ ID NO: 9233 - DNA, 18 bp, Homo sapiens
cccgaaaggaggaaggaa

SEQ ID NO: 9234 - DNA, 19 bp, Homo sapiens
cccgaacatggcgaccgcg

SEQ ID NO: 9235 - DNA, 20 bp, Homo sapiens
cccgaagggctcaactgtca

SEQ ID NO: 9236 - DNA, 19 bp, Homo sapiens
cccgacgcgtgtgtgctag

SEQ ID NO: 9237 - DNA, 21 bp, Homo sapiens
cccgacggaaaactgcgctaa

SEQ ID NO: 9238 - DNA, 18 bp, Homo sapiens
cccgacggcagggaagtt

SEQ ID NO: 9239 - DNA, 23 bp, Homo sapiens
cccgacgggaggggctccggatc

SEQ ID NO: 9240 - DNA, 23 bp, Homo sapiens
cccgactgtggagaagtgtccgg

SEQ ID NO: 9241 - DNA, 18 bp, Homo sapiens
cccgagacgcggcgcgca

SEQ ID NO: 9242 - DNA, 23 bp, Homo sapiens
cccgagcacgttagaaagcctga

SEQ ID NO: 9243 - DNA, 24 bp, Homo sapiens
cccgagcgcggtgagctgctgggc

SEQ ID NO: 9244 - DNA, 20 bp, Homo sapiens
cccgagcggacgtagagcat

SEQ ID NO: 9245 - DNA, 18 bp, Homo sapiens
cccgagcggatcgcgggc

SEQ ID NO: 9246 - DNA, 18 bp, Homo sapiens
cccgagctgctctacgcg

SEQ ID NO: 9247 - DNA, 17 bp, Homo sapiens
cccgaggacacctcgca

SEQ ID NO: 9248 - DNA, 20 bp, Homo sapiens
cccgaggcagaggaacaggg

SEQ ID NO: 9249 - DNA, 17 bp, Homo sapiens
cccgaggccacgcccca

SEQ ID NO: 9250 - DNA, 19 bp, Homo sapiens
cccgaggccacgccccaga

SEQ ID NO: 9251 - DNA, 22 bp, Homo sapiens
cccgaggcggaagtgggacggc

SEQ ID NO: 9252 - DNA, 17 bp, Homo sapiens
cccgaggcggctgtagc

SEQ ID NO: 9253 - DNA, 17 bp, Homo sapiens
cccgaggctcgtgcgtg

SEQ ID NO: 9254 - DNA, 21 bp, Homo sapiens
cccgagtgcactgaagatggc

SEQ ID NO: 9255 - DNA, 20 bp, Homo sapiens
cccgagttgctgcagcagca

SEQ ID NO: 9256 - DNA, 18 bp, Homo sapiens
cccgatcgggctaggccg

SEQ ID NO: 9257 - DNA, 15 bp, Homo sapiens
cccgatgcgcgggag

SEQ ID NO: 9258 - DNA, 16 bp, Homo sapiens
cccgcacaactgctaa

SEQ ID NO: 9259 - DNA, 19 bp, Homo sapiens
cccgcactcccggccctgc

SEQ ID NO: 9260 - DNA, 18 bp, Homo sapiens
cccgcagcaaacacatcc

SEQ ID NO: 9261 - DNA, 18 bp, Homo sapiens
cccgcagccagcagagaa

SEQ ID NO: 9262 - DNA, 19 bp, Homo sapiens
cccgcagctcggggccggc

SEQ ID NO: 9263 - DNA, 19 bp, Homo sapiens
cccgcaggatgaagaagga

SEQ ID NO: 9264 - DNA, 18 bp, Homo sapiens
cccgcaggcgctcggggt

SEQ ID NO: 9265 - DNA, 21 bp, Homo sapiens
cccgcaggctggagctaggcg

SEQ ID NO: 9266 - DNA, 19 bp, Homo sapiens
cccgccacttgattctgga

SEQ ID NO: 9267 - DNA, 18 bp, Homo sapiens
cccgccagccggcccggg

SEQ ID NO: 9268 - DNA, 22 bp, Homo sapiens
cccgccatggaggacctgggtg

SEQ ID NO: 9269 - DNA, 21 bp, Homo sapiens
cccgccatgggggacgaggac

SEQ ID NO: 9270 - DNA, 16 bp, Homo sapiens
cccgcccctccttccg

SEQ ID NO: 9271 - DNA, 23 bp, Homo sapiens
cccgcccctttccaagcgtgtcc

SEQ ID NO: 9272 - DNA, 18 bp, Homo sapiens
cccgcccgcggcaaacat

SEQ ID NO: 9273 - DNA, 18 bp, Homo sapiens
cccgccctccgaatccag

SEQ ID NO: 9274 - DNA, 22 bp, Homo sapiens
cccgccgcgcccatcccgatgg

SEQ ID NO: 9275 - DNA, 18 bp, Homo sapiens
cccgccgcgcgcgcgcgc

SEQ ID NO: 9276 - DNA, 18 bp, Homo sapiens
cccgccgctgagggaccg

SEQ ID NO: 9277 - DNA, 20 bp, Homo sapiens
cccgccggacttcgagggtg

SEQ ID NO: 9278 - DNA, 21 bp, Homo sapiens
cccgcctcagacttcctcctt

SEQ ID NO: 9279 - DNA, 19 bp, Homo sapiens
cccgcctgctacgagtaga

SEQ ID NO: 9280 - DNA, 22 bp, Homo sapiens
cccgcctgggctagcacgtggg

SEQ ID NO: 9281 - DNA, 18 bp, Homo sapiens
cccgcgacccacatccga

SEQ ID NO: 9282 - DNA, 20 bp, Homo sapiens
cccgcgaccccaacgtccca

SEQ ID NO: 9283 - DNA, 23 bp, Homo sapiens
cccgcgacccggagcagctcgga

SEQ ID NO: 9284 - DNA, 20 bp, Homo sapiens
cccgcgagcggggaggaggc

SEQ ID NO: 9285 - DNA, 18 bp, Homo sapiens
cccgcgagctcggagggc

SEQ ID NO: 9286 - DNA, 19 bp, Homo sapiens
gggaggagatccgctcaca

SEQ ID NO: 9287 - DNA, 18 bp, Homo sapiens
gggaggatactgcttagg

SEQ ID NO: 9288 - DNA, 18 bp, Homo sapiens
gggaggatgaaccccaca

SEQ ID NO: 9289 - DNA, 18 bp, Homo sapiens
gggaggcgagcagctctg

SEQ ID NO: 9290 - DNA, 18 bp, Homo sapiens
gggaggcgcgcgcggagg

SEQ ID NO: 9291 - DNA, 18 bp, Homo sapiens
gggaggcggaggaaccgg

SEQ ID NO: 9292 - DNA, 17 bp, Homo sapiens
gggaggcggcggaggaa

SEQ ID NO: 9293 - DNA, 21 bp, Homo sapiens
gggaggcggcgggcgaagcgc

SEQ ID NO: 9294 - DNA, 21 bp, Homo sapiens
gggaggcgggcgcggcaggac

SEQ ID NO: 9295 - DNA, 17 bp, Homo sapiens
gggaggcttttaattcc

SEQ ID NO: 9296 - DNA, 19 bp, Homo sapiens
gggagggaggcggcggagg

SEQ ID NO: 9297 - DNA, 16 bp, Homo sapiens
gggagggtagagggtg

SEQ ID NO: 9298 - DNA, 18 bp, Homo sapiens
gggagggtaggatggcgt

SEQ ID NO: 9299 - DNA, 23 bp, Homo sapiens
gggagtagtagctggggggcaag

SEQ ID NO: 9300 - DNA, 18 bp, Homo sapiens
gggagtccagtggctgca

SEQ ID NO: 9301 - DNA, 21 bp, Homo sapiens
gggagtcgccggggctccttc

SEQ ID NO: 9302 - DNA, 20 bp, Homo sapiens
gggagtcggcgccatgaccc

SEQ ID NO: 9303 - DNA, 19 bp, Homo sapiens
gggagtcgtttctcggcca

SEQ ID NO: 9304 - DNA, 18 bp, Homo sapiens
gggagtctcggagacgtg

SEQ ID NO: 9305 - DNA, 18 bp, Homo sapiens
gggagtgagggcagggcg

SEQ ID NO: 9306 - DNA, 24 bp, Homo sapiens
gggagtgtgtgcgccgggagctgg

SEQ ID NO: 9307 - DNA, 17 bp, Homo sapiens
gggagtgttgttagcgc

SEQ ID NO: 9308 - DNA, 18 bp, Homo sapiens
gggatagtcggagcgagg

SEQ ID NO: 9309 - DNA, 18 bp, Homo sapiens
gggatatcgggtggcggc

SEQ ID NO: 9310 - DNA, 20 bp, Homo sapiens
gggatatcgggtggcggctc

SEQ ID NO: 9311 - DNA, 18 bp, Homo sapiens
gggatcatggcggagaat

SEQ ID NO: 9312 - DNA, 17 bp, Homo sapiens
gggatcgaggggtgagg

SEQ ID NO: 9313 - DNA, 18 bp, Homo sapiens
gggatcgtggcggagcgc

SEQ ID NO: 9314 - DNA, 23 bp, Homo sapiens
gggatctgggctccgccgtggtg

SEQ ID NO: 9315 - DNA, 18 bp, Homo sapiens
gggatgaacagcggcggc

SEQ ID NO: 9316 - DNA, 17 bp, Homo sapiens
gggatgagaaactacgg

SEQ ID NO: 9317 - DNA, 21 bp, Homo sapiens
gggatgagaaactacggcgac

SEQ ID NO: 9318 - DNA, 18 bp, Homo sapiens
gggatggcgacgtctaca

SEQ ID NO: 9319 - DNA, 21 bp, Homo sapiens
gggatgggccgcgggcccgga

SEQ ID NO: 9320 - DNA, 18 bp, Homo sapiens
gggatgtgggggaagcga

SEQ ID NO: 9321 - DNA, 17 bp, Homo sapiens
gggatgttttcggttgt

SEQ ID NO: 9322 - DNA, 18 bp, Homo sapiens
gggattagttggtttcgg

SEQ ID NO: 9323 - DNA, 18 bp, Homo sapiens
gggattgggcgggctgcc

SEQ ID NO: 9324 - DNA, 17 bp, Homo sapiens
gggatttgggtgacgca

SEQ ID NO: 9325 - DNA, 18 bp, Homo sapiens
gggcaaatacagccttcc

SEQ ID NO: 9326 - DNA, 18 bp, Homo sapiens
gggcaacgcggtgccctg

SEQ ID NO: 9327 - DNA, 17 bp, Homo sapiens
gggcaactgggccccgg

SEQ ID NO: 9328 - DNA, 16 bp, Homo sapiens
gggcaaggaggacgcg

SEQ ID NO: 9329 - DNA, 19 bp, Homo sapiens
gggcacaccctgagggtag

SEQ ID NO: 9330 - DNA, 18 bp, Homo sapiens
gggcacagttgaagaagc

SEQ ID NO: 9331 - DNA, 21 bp, Homo sapiens
gggcaccatctttggtaagga

SEQ ID NO: 9332 - DNA, 20 bp, Homo sapiens
gggcacgttactccgtccga

SEQ ID NO: 9333 - DNA, 18 bp, Homo sapiens
gggcactgggaagcgcca

SEQ ID NO: 9334 - DNA, 18 bp, Homo sapiens
gggcactgtaaatggcgg

SEQ ID NO: 9335 - DNA, 21 bp, Homo sapiens
gggcagaaaggaaccgggttg

SEQ ID NO: 9336 - DNA, 18 bp, Homo sapiens
gggcagagcgctagggct

SEQ ID NO: 9337 - DNA, 20 bp, Homo sapiens
gggcagaggcggagagaacc

SEQ ID NO: 9338 - DNA, 21 bp, Homo sapiens
gggcagataaaccgtacgtcc

SEQ ID NO: 9339 - DNA, 19 bp, Homo sapiens
gggcagatcgaaaagggag

SEQ ID NO: 9340 - DNA, 20 bp, Homo sapiens
gggcagcgctcattcggccg

SEQ ID NO: 9341 - DNA, 17 bp, Homo sapiens
gggcagcgggcacttct

SEQ ID NO: 9342 - DNA, 18 bp, Homo sapiens
gggcagcggggccgcctg

SEQ ID NO: 9343 - DNA, 21 bp, Homo sapiens
cccgcgaggctgaggggcggt

SEQ ID NO: 9344 - DNA, 16 bp, Homo sapiens
cccgcgagggggcccg

SEQ ID NO: 9345 - DNA, 21 bp, Homo sapiens
cccgcgcccctgatatctgca

SEQ ID NO: 9346 - DNA, 15 bp, Homo sapiens
cccgcgcccgacgga

SEQ ID NO: 9347 - DNA, 19 bp, Homo sapiens
cccgcgccggactcaccgc

SEQ ID NO: 9348 - DNA, 16 bp, Homo sapiens
cccgcgccggccacgg

SEQ ID NO: 9349 - DNA, 17 bp, Homo sapiens
cccgcgcctgcttctct

SEQ ID NO: 9350 - DNA, 18 bp, Homo sapiens
cccgcgccttagcctgtc

SEQ ID NO: 9351 - DNA, 21 bp, Homo sapiens
cccgcgcgccatcttggctcc

SEQ ID NO: 9352 - DNA, 18 bp, Homo sapiens
cccgcgcgggcgatgccc

SEQ ID NO: 9353 - DNA, 17 bp, Homo sapiens
cccgcgctggcctccag

SEQ ID NO: 9354 - DNA, 20 bp, Homo sapiens
cccgcggaagggcagcttct

SEQ ID NO: 9355 - DNA, 17 bp, Homo sapiens
cccgcggacaccaggca

SEQ ID NO: 9356 - DNA, 18 bp, Homo sapiens
cccgcgggcactgaagtc

SEQ ID NO: 9357 - DNA, 20 bp, Homo sapiens
cccgcgggcggtggggacgg

SEQ ID NO: 9358 - DNA, 17 bp, Homo sapiens
cccgcgggctgaggcag

SEQ ID NO: 9359 - DNA, 18 bp, Homo sapiens
cccgcgggctggggcggt

SEQ ID NO: 9360 - DNA, 20 bp, Homo sapiens
cccgcgggtctgtctcttgc

SEQ ID NO: 9361 - DNA, 19 bp, Homo sapiens
cccgcgggtgccatcatgg

SEQ ID NO: 9362 - DNA, 19 bp, Homo sapiens
cccgcgggtggcgcgcggc

SEQ ID NO: 9363 - DNA, 22 bp, Homo sapiens
cccgcggtcatgtgacacagcg

SEQ ID NO: 9364 - DNA, 18 bp, Homo sapiens
cccgcgtcccccgagcgc

SEQ ID NO: 9365 - DNA, 20 bp, Homo sapiens
cccgcgtctctgggcttttg

SEQ ID NO: 9366 - DNA, 18 bp, Homo sapiens
cccgcgtgtggcgcaggc

SEQ ID NO: 9367 - DNA, 18 bp, Homo sapiens
cccgctagtgccgggcgg

SEQ ID NO: 9368 - DNA, 18 bp, Homo sapiens
cccgctccaggtccggga

SEQ ID NO: 9369 - DNA, 19 bp, Homo sapiens
cccgctccaggtccgggac

SEQ ID NO: 9370 - DNA, 17 bp, Homo sapiens
cccgctcggaaggtgag

SEQ ID NO: 9371 - DNA, 18 bp, Homo sapiens
cccgctcgggccgaggcg

SEQ ID NO: 9372 - DNA, 22 bp, Homo sapiens
cccgctgcagtctgtgcaggtc

SEQ ID NO: 9373 - DNA, 22 bp, Homo sapiens
cccgctgcggaatggttcggaa

SEQ ID NO: 9374 - DNA, 19 bp, Homo sapiens
cccgctgcggagtgaacgg

SEQ ID NO: 9375 - DNA, 20 bp, Homo sapiens
cccgctgcggagtgaacggt

SEQ ID NO: 9376 - DNA, 21 bp, Homo sapiens
cccgctgcggagtgaacggtg

SEQ ID NO: 9377 - DNA, 22 bp, Homo sapiens
cccgctgcggagtgaacggtgt

SEQ ID NO: 9378 - DNA, 18 bp, Homo sapiens
cccgctgcggggacgttc

SEQ ID NO: 9379 - DNA, 17 bp, Homo sapiens
cccgcttcgcgcgcgct

SEQ ID NO: 9380 - DNA, 18 bp, Homo sapiens
cccggaaagaaggagggc

SEQ ID NO: 9381 - DNA, 21 bp, Homo sapiens
cccggaaagaaggagggctag

SEQ ID NO: 9382 - DNA, 18 bp, Homo sapiens
cccggaagaagcgaccaa

SEQ ID NO: 9383 - DNA, 18 bp, Homo sapiens
cccggaagcagtccccgg

SEQ ID NO: 9384 - DNA, 22 bp, Homo sapiens
cccggaagcggtagcagggccc

SEQ ID NO: 9385 - DNA, 17 bp, Homo sapiens
cccggaagtggagcggc

SEQ ID NO: 9386 - DNA, 18 bp, Homo sapiens
cccggaagtggccgagcc

SEQ ID NO: 9387 - DNA, 17 bp, Homo sapiens
cccggacaagggcaacg

SEQ ID NO: 9388 - DNA, 24 bp, Homo sapiens
cccggacaagggcaacgagcgttt

SEQ ID NO: 9389 - DNA, 18 bp, Homo sapiens
cccggacaggaggcagtg

SEQ ID NO: 9390 - DNA, 22 bp, Homo sapiens
cccggacaggaggcagtgccgc

SEQ ID NO: 9391 - DNA, 17 bp, Homo sapiens
cccggacatggaggacg

SEQ ID NO: 9392 - DNA, 19 bp, Homo sapiens
cccggaccgcgcgatggag

SEQ ID NO: 9393 - DNA, 17 bp, Homo sapiens
cccggacgcgacggagg

SEQ ID NO: 9394 - DNA, 18 bp, Homo sapiens
cccggacgcggagcgaga

SEQ ID NO: 9395 - DNA, 18 bp, Homo sapiens
cccggacggaagtgcctc

SEQ ID NO: 9396 - DNA, 19 bp, Homo sapiens
cccggacggagggccggcg

SEQ ID NO: 9397 - DNA, 17 bp, Homo sapiens
cccggacggtgaaggcg

SEQ ID NO: 9398 - DNA, 18 bp, Homo sapiens
cccggactccttggtagt

SEQ ID NO: 9399 - DNA, 19 bp, Homo sapiens
cccggactgcgcccggcag

SEQ ID NO: 9400 - DNA, 19 bp, Homo sapiens
gggcaggacctagacgcgc

SEQ ID NO: 9401 - DNA, 19 bp, Homo sapiens
gggcaggagtgaaggagag

SEQ ID NO: 9402 - DNA, 19 bp, Homo sapiens
gggcaggattggggacgag

SEQ ID NO: 9403 - DNA, 18 bp, Homo sapiens
gggcagggacgcagtgaa

SEQ ID NO: 9404 - DNA, 19 bp, Homo sapiens
gggcagtagaggcgcgggg

SEQ ID NO: 9405 - DNA, 19 bp, Homo sapiens
gggcagtgcgctgagcgcc

SEQ ID NO: 9406 - DNA, 20 bp, Homo sapiens
gggcagttggctggaggggc

SEQ ID NO: 9407 - DNA, 18 bp, Homo sapiens
gggccaatgaagttcttg

SEQ ID NO: 9408 - DNA, 16 bp, Homo sapiens
gggccacccggggcac

SEQ ID NO: 9409 - DNA, 21 bp, Homo sapiens
gggccacgctgctggctggcc

SEQ ID NO: 9410 - DNA, 18 bp, Homo sapiens
gggccacgtctgcggttc

SEQ ID NO: 9411 - DNA, 22 bp, Homo sapiens
gggccagaatcgaaactgagag

SEQ ID NO: 9412 - DNA, 20 bp, Homo sapiens
gggccagagctcttccctta

SEQ ID NO: 9413 - DNA, 17 bp, Homo sapiens
gggccagcgccgcgcgc

SEQ ID NO: 9414 - DNA, 17 bp, Homo sapiens
gggccaggcaggaagat

SEQ ID NO: 9415 - DNA, 22 bp, Homo sapiens
gggcccagcttgtcgctctttc

SEQ ID NO: 9416 - DNA, 18 bp, Homo sapiens
gggcccaggaagggcaga

SEQ ID NO: 9417 - DNA, 19 bp, Homo sapiens
gggccccacgcggctggca

SEQ ID NO: 9418 - DNA, 16 bp, Homo sapiens
gggccccgcgggcagc

SEQ ID NO: 9419 - DNA, 18 bp, Homo sapiens
gggcccggacacgctgag

SEQ ID NO: 9420 - DNA, 18 bp, Homo sapiens
gggcccggatctcaaaca

SEQ ID NO: 9421 - DNA, 22 bp, Homo sapiens
gggcccggcggggagcgggtcc

SEQ ID NO: 9422 - DNA, 16 bp, Homo sapiens
gggcccgtcggacagc

SEQ ID NO: 9423 - DNA, 18 bp, Homo sapiens
gggcccgtcggacagcca

SEQ ID NO: 9424 - DNA, 19 bp, Homo sapiens
gggcccgtcggacagccac

SEQ ID NO: 9425 - DNA, 20 bp, Homo sapiens
gggccctcggaaagaacgga

SEQ ID NO: 9426 - DNA, 21 bp, Homo sapiens
gggccgagccgagcgccgagc

SEQ ID NO: 9427 - DNA, 17 bp, Homo sapiens
gggccgagtcggagacc

SEQ ID NO: 9428 - DNA, 18 bp, Homo sapiens
gggccgagtcggagaccg

SEQ ID NO: 9429 - DNA, 17 bp, Homo sapiens
gggccgcatctcggcgg

SEQ ID NO: 9430 - DNA, 18 bp, Homo sapiens
gggccgccatcccctcag

SEQ ID NO: 9431 - DNA, 20 bp, Homo sapiens
gggccgccgctcggccatga

SEQ ID NO: 9432 - DNA, 20 bp, Homo sapiens
gggccggaagccgcgaggag

SEQ ID NO: 9433 - DNA, 18 bp, Homo sapiens
gggccggaggagagcccc

SEQ ID NO: 9434 - DNA, 16 bp, Homo sapiens
gggccggcactgcccg

SEQ ID NO: 9435 - DNA, 20 bp, Homo sapiens
gggccggcctgggcggggcg

SEQ ID NO: 9436 - DNA, 22 bp, Homo sapiens
gggccggcggcgggctggcgga

SEQ ID NO: 9437 - DNA, 18 bp, Homo sapiens
gggccgggaggggccgaa

SEQ ID NO: 9438 - DNA, 18 bp, Homo sapiens
gggccgggccagcgctcc

SEQ ID NO: 9439 - DNA, 19 bp, Homo sapiens
gggccgggctgggcagctt

SEQ ID NO: 9440 - DNA, 17 bp, Homo sapiens
gggccggttgatacagt

SEQ ID NO: 9441 - DNA, 20 bp, Homo sapiens
gggccgtcgtgggctccggc

SEQ ID NO: 9442 - DNA, 18 bp, Homo sapiens
gggccgtgagctcacgga

SEQ ID NO: 9443 - DNA, 18 bp, Homo sapiens
gggccgtgctgcttatgg

SEQ ID NO: 9444 - DNA, 19 bp, Homo sapiens
gggccgtgctgcttatggc

SEQ ID NO: 9445 - DNA, 23 bp, Homo sapiens
gggccgtgtgcagacccgcgtgt

SEQ ID NO: 9446 - DNA, 18 bp, Homo sapiens
gggcctagggtgggacga

SEQ ID NO: 9447 - DNA, 19 bp, Homo sapiens
gggcctcttccgcggcggc

SEQ ID NO: 9448 - DNA, 19 bp, Homo sapiens
gggcctggaggtttgcgta

SEQ ID NO: 9449 - DNA, 20 bp, Homo sapiens
gggcctggggagctggcgct

SEQ ID NO: 9450 - DNA, 19 bp, Homo sapiens
gggcctgggtctgcctgag

SEQ ID NO: 9451 - DNA, 18 bp, Homo sapiens
gggcctttgtgaccccag

SEQ ID NO: 9452 - DNA, 17 bp, Homo sapiens
gggcgaagcggcctgcg

SEQ ID NO: 9453 - DNA, 19 bp, Homo sapiens
gggcgaccacgggccggga

SEQ ID NO: 9454 - DNA, 18 bp, Homo sapiens
gggcgagaggactgagtg

SEQ ID NO: 9455 - DNA, 19 bp, Homo sapiens
gggcgagagtgagtaccag

SEQ ID NO: 9456 - DNA, 19 bp, Homo sapiens
gggcgagcggttgtgcttg

SEQ ID NO: 9457 - DNA, 18 bp, Homo sapiens
cccggactgcggaaggat

SEQ ID NO: 9458 - DNA, 20 bp, Homo sapiens
cccggactgcggaaggatgg

SEQ ID NO: 9459 - DNA, 19 bp, Homo sapiens
cccggactgtcgcggcccg

SEQ ID NO: 9460 - DNA, 15 bp, Homo sapiens
cccggagagatacgg

SEQ ID NO: 9461 - DNA, 17 bp, Homo sapiens
cccggagagctgagcag

SEQ ID NO: 9462 - DNA, 19 bp, Homo sapiens
cccggagatagcggggggc

SEQ ID NO: 9463 - DNA, 18 bp, Homo sapiens
cccggagcaagcggagct

SEQ ID NO: 9464 - DNA, 16 bp, Homo sapiens
cccggagcagaaccgc

SEQ ID NO: 9465 - DNA, 18 bp, Homo sapiens
cccggaggacagagcggc

SEQ ID NO: 9466 - DNA, 19 bp, Homo sapiens
cccggaggagccgcggcta

SEQ ID NO: 9467 - DNA, 18 bp, Homo sapiens
cccggaggcaagagggcg

SEQ ID NO: 9468 - DNA, 17 bp, Homo sapiens
cccggaggctttgggtg

SEQ ID NO: 9469 - DNA, 18 bp, Homo sapiens
cccggaggtctgtcatgc

SEQ ID NO: 9470 - DNA, 19 bp, Homo sapiens
cccggagtgtggtacttct

SEQ ID NO: 9471 - DNA, 18 bp, Homo sapiens
cccggatacggctgattt

SEQ ID NO: 9472 - DNA, 18 bp, Homo sapiens
cccggatcggcaacagtg

SEQ ID NO: 9473 - DNA, 19 bp, Homo sapiens
cccggatcggcaacagtgc

SEQ ID NO: 9474 - DNA, 18 bp, Homo sapiens
cccggatggaacccgggc

SEQ ID NO: 9475 - DNA, 18 bp, Homo sapiens
cccggcagcctggacggg

SEQ ID NO: 9476 - DNA, 18 bp, Homo sapiens
cccggcagccttgctcag

SEQ ID NO: 9477 - DNA, 18 bp, Homo sapiens
cccggcaggctgcggaag

SEQ ID NO: 9478 - DNA, 18 bp, Homo sapiens
cccggcaggtcaggatct

SEQ ID NO: 9479 - DNA, 23 bp, Homo sapiens
cccggcccgggaggagcaggacg

SEQ ID NO: 9480 - DNA, 17 bp, Homo sapiens
cccggccctggaagcgc

SEQ ID NO: 9481 - DNA, 20 bp, Homo sapiens
cccggcctccctctcccagc

SEQ ID NO: 9482 - DNA, 19 bp, Homo sapiens
cccggcctgggccttttat

SEQ ID NO: 9483 - DNA, 17 bp, Homo sapiens
cccggcggcggcagaag

SEQ ID NO: 9484 - DNA, 20 bp, Homo sapiens
cccggcggctccgggtttgg

SEQ ID NO: 9485 - DNA, 18 bp, Homo sapiens
cccggcggctctggcacc

SEQ ID NO: 9486 - DNA, 17 bp, Homo sapiens
cccggcgggcgccggcg

SEQ ID NO: 9487 - DNA, 23 bp, Homo sapiens
cccggcgggctgtggcaggaggg

SEQ ID NO: 9488 - DNA, 24 bp, Homo sapiens
cccggcgtgcgcggagcggggcag

SEQ ID NO: 9489 - DNA, 17 bp, Homo sapiens
cccggcgtgtagcgggc

SEQ ID NO: 9490 - DNA, 18 bp, Homo sapiens
cccggctagaagcgacac

SEQ ID NO: 9491 - DNA, 18 bp, Homo sapiens
cccggctgacgttggacg

SEQ ID NO: 9492 - DNA, 16 bp, Homo sapiens
cccggctgcaggcgga

SEQ ID NO: 9493 - DNA, 20 bp, Homo sapiens
cccggctgcagggatggcgg

SEQ ID NO: 9494 - DNA, 19 bp, Homo sapiens
cccggctgcggctcccggc

SEQ ID NO: 9495 - DNA, 19 bp, Homo sapiens
cccggctgcggggtaggag

SEQ ID NO: 9496 - DNA, 18 bp, Homo sapiens
cccggctggcctggacga

SEQ ID NO: 9497 - DNA, 16 bp, Homo sapiens
cccggctggcgcggcg

SEQ ID NO: 9498 - DNA, 22 bp, Homo sapiens
cccggctgggacttggagtccc

SEQ ID NO: 9499 - DNA, 19 bp, Homo sapiens
cccggctttgccgtccggc

SEQ ID NO: 9500 - DNA, 18 bp, Homo sapiens
cccgggaagacgaatctc

SEQ ID NO: 9501 - DNA, 18 bp, Homo sapiens
cccgggaagggtgggctg

SEQ ID NO: 9502 - DNA, 18 bp, Homo sapiens
cccgggagatgagagcag

SEQ ID NO: 9503 - DNA, 19 bp, Homo sapiens
cccgggagatgagagcagc

SEQ ID NO: 9504 - DNA, 19 bp, Homo sapiens
cccgggagcggagagcgag

SEQ ID NO: 9505 - DNA, 22 bp, Homo sapiens
cccgggatctggatgaccgcgt

SEQ ID NO: 9506 - DNA, 17 bp, Homo sapiens
cccgggattagttggtt

SEQ ID NO: 9507 - DNA, 18 bp, Homo sapiens
cccgggcagggaagtcgg

SEQ ID NO: 9508 - DNA, 18 bp, Homo sapiens
cccgggcccaggaagggc

SEQ ID NO: 9509 - DNA, 18 bp, Homo sapiens
cccgggccgtggaaggtg

SEQ ID NO: 9510 - DNA, 23 bp, Homo sapiens
cccgggcggctcccagggacgcg

SEQ ID NO: 9511 - DNA, 19 bp, Homo sapiens
cccgggcgggcgggcgcgg

SEQ ID NO: 9512 - DNA, 23 bp, Homo sapiens
cccgggctcgggtaaccggagtg

SEQ ID NO: 9513 - DNA, 17 bp, Homo sapiens
cccgggctgatcaggtg

SEQ ID NO: 9514 - DNA, 18 bp, Homo sapiens
gggcgagctctggggcgg

SEQ ID NO: 9515 - DNA, 19 bp, Homo sapiens
gggcgaggagccgggagca

SEQ ID NO: 9516 - DNA, 17 bp, Homo sapiens
gggcgaggccggaactg

SEQ ID NO: 9517 - DNA, 18 bp, Homo sapiens
gggcgaggccggaactgg

SEQ ID NO: 9518 - DNA, 18 bp, Homo sapiens
gggcgagggcaccgccgc

SEQ ID NO: 9519 - DNA, 18 bp, Homo sapiens
gggcgaggtggaggccca

SEQ ID NO: 9520 - DNA, 18 bp, Homo sapiens
gggcgagtccccggctcc

SEQ ID NO: 9521 - DNA, 18 bp, Homo sapiens
gggcgcaggcgtttcctc

SEQ ID NO: 9522 - DNA, 16 bp, Homo sapiens
gggcgcccggccaccg

SEQ ID NO: 9523 - DNA, 17 bp, Homo sapiens
gggcgccgagtgtcggg

SEQ ID NO: 9524 - DNA, 21 bp, Homo sapiens
gggcgccgccgactgaagtag

SEQ ID NO: 9525 - DNA, 16 bp, Homo sapiens
gggcgcctggcgctac

SEQ ID NO: 9526 - DNA, 15 bp, Homo sapiens
gggcgcgggcccggt

SEQ ID NO: 9527 - DNA, 21 bp, Homo sapiens
gggcgcgggggcggcgtgtca

SEQ ID NO: 9528 - DNA, 20 bp, Homo sapiens
gggcgcgtgggtgaggaagg

SEQ ID NO: 9529 - DNA, 21 bp, Homo sapiens
gggcgctcacttgccccggaa

SEQ ID NO: 9530 - DNA, 18 bp, Homo sapiens
gggcgctccaggcgacag

SEQ ID NO: 9531 - DNA, 19 bp, Homo sapiens
gggcgctccgggaagggcg

SEQ ID NO: 9532 - DNA, 17 bp, Homo sapiens
gggcgctggcagcgtca

SEQ ID NO: 9533 - DNA, 18 bp, Homo sapiens
gggcgctgtttctcggta

SEQ ID NO: 9534 - DNA, 17 bp, Homo sapiens
gggcgcttgggccgcca

SEQ ID NO: 9535 - DNA, 21 bp, Homo sapiens
gggcggaagtcggggtctgac

SEQ ID NO: 9536 - DNA, 19 bp, Homo sapiens
gggcggacccggaacccag

SEQ ID NO: 9537 - DNA, 17 bp, Homo sapiens
gggcggacggtggctgg

SEQ ID NO: 9538 - DNA, 21 bp, Homo sapiens
gggcggagaggaaggagcgcg

SEQ ID NO: 9539 - DNA, 18 bp, Homo sapiens
gggcggagcagggggctg

SEQ ID NO: 9540 - DNA, 18 bp, Homo sapiens
gggcggaggcggagcagg

SEQ ID NO: 9541 - DNA, 18 bp, Homo sapiens
gggcggagggcggaactt

SEQ ID NO: 9542 - DNA, 22 bp, Homo sapiens
gggcggagggcggaactttggg

SEQ ID NO: 9543 - DNA, 17 bp, Homo sapiens
gggcggatggagcagga

SEQ ID NO: 9544 - DNA, 22 bp, Homo sapiens
gggcggatgtctccggcgcgtc

SEQ ID NO: 9545 - DNA, 23 bp, Homo sapiens
gggcggattgtctgtcgttgcag

SEQ ID NO: 9546 - DNA, 19 bp, Homo sapiens
gggcggcagcagcagcagc

SEQ ID NO: 9547 - DNA, 16 bp, Homo sapiens
gggcggcaggttgcag

SEQ ID NO: 9548 - DNA, 17 bp, Homo sapiens
gggcggcgcgtggtcta

SEQ ID NO: 9549 - DNA, 18 bp, Homo sapiens
gggcggcggcgacgcccc

SEQ ID NO: 9550 - DNA, 18 bp, Homo sapiens
gggcggcgggacagacgg

SEQ ID NO: 9551 - DNA, 20 bp, Homo sapiens
gggcggctgaagaaggagct

SEQ ID NO: 9552 - DNA, 17 bp, Homo sapiens
gggcggctgcctagcac

SEQ ID NO: 9553 - DNA, 21 bp, Homo sapiens
gggcggctggaccgacggctg

SEQ ID NO: 9554 - DNA, 20 bp, Homo sapiens
gggcgggacttcctctacca

SEQ ID NO: 9555 - DNA, 19 bp, Homo sapiens
gggcgggagcggggaaaac

SEQ ID NO: 9556 - DNA, 18 bp, Homo sapiens
gggcgggatctggcggag

SEQ ID NO: 9557 - DNA, 20 bp, Homo sapiens
gggcgggccggggtcagctg

SEQ ID NO: 9558 - DNA, 17 bp, Homo sapiens
gggcgggctgttgacgg

SEQ ID NO: 9559 - DNA, 17 bp, Homo sapiens
gggcggggagcggagct

SEQ ID NO: 9560 - DNA, 18 bp, Homo sapiens
gggcggggtttcccggcg

SEQ ID NO: 9561 - DNA, 18 bp, Homo sapiens
gggcggtacccggccgta

SEQ ID NO: 9562 - DNA, 17 bp, Homo sapiens
gggcggtatagagcggg

SEQ ID NO: 9563 - DNA, 21 bp, Homo sapiens
gggcggtccttcagcccgcac

SEQ ID NO: 9564 - DNA, 21 bp, Homo sapiens
gggcggtcgcggcacagccgc

SEQ ID NO: 9565 - DNA, 17 bp, Homo sapiens
gggcggtgcgagcggcg

SEQ ID NO: 9566 - DNA, 20 bp, Homo sapiens
gggcggtgggctgcgcgttg

SEQ ID NO: 9567 - DNA, 18 bp, Homo sapiens
gggcgtagaagccaggcg

SEQ ID NO: 9568 - DNA, 18 bp, Homo sapiens
gggcgtcaggctctgtgt

SEQ ID NO: 9569 - DNA, 20 bp, Homo sapiens
gggcgtcccggaacagtctg

SEQ ID NO: 9570 - DNA, 18 bp, Homo sapiens
gggcgtcgcggccgcccc

SEQ ID NO: 9571 - DNA, 19 bp, Homo sapiens
cccgggctggcgggagtgc

SEQ ID NO: 9572 - DNA, 19 bp, Homo sapiens
cccgggctgtagtgccggc

SEQ ID NO: 9573 - DNA, 18 bp, Homo sapiens
cccgggctttggtccagc

SEQ ID NO: 9574 - DNA, 18 bp, Homo sapiens
cccggggacgccaagcgg

SEQ ID NO: 9575 - DNA, 23 bp, Homo sapiens
cccggggagaggtacccggccag

SEQ ID NO: 9576 - DNA, 19 bp, Homo sapiens
cccggggaggctggggctg

SEQ ID NO: 9577 - DNA, 20 bp, Homo sapiens
cccggggcctggaggagcgg

SEQ ID NO: 9578 - DNA, 17 bp, Homo sapiens
cccggggctgggtacat

SEQ ID NO: 9579 - DNA, 18 bp, Homo sapiens
cccggggtaggtccgcgg

SEQ ID NO: 9580 - DNA, 17 bp, Homo sapiens
cccgggtatctgcggcc

SEQ ID NO: 9581 - DNA, 20 bp, Homo sapiens
cccgggtgagaggttcccgc

SEQ ID NO: 9582 - DNA, 21 bp, Homo sapiens
cccgggtggggaagctggagc

SEQ ID NO: 9583 - DNA, 22 bp, Homo sapiens
cccgggtgttcgccgctggagc

SEQ ID NO: 9584 - DNA, 17 bp, Homo sapiens
cccggtaccctcgctcc

SEQ ID NO: 9585 - DNA, 17 bp, Homo sapiens
cccggtcgcgcgtggag

SEQ ID NO: 9586 - DNA, 16 bp, Homo sapiens
cccggtcggactagga

SEQ ID NO: 9587 - DNA, 23 bp, Homo sapiens
cccggtggcacacgggccactgc

SEQ ID NO: 9588 - DNA, 17 bp, Homo sapiens
cccggtggtgagggcag

SEQ ID NO: 9589 - DNA, 18 bp, Homo sapiens
cccggtgtttgggaccgg

SEQ ID NO: 9590 - DNA, 18 bp, Homo sapiens
cccggttccccagcgagc

SEQ ID NO: 9591 - DNA, 18 bp, Homo sapiens
cccggttgctgcttgctg

SEQ ID NO: 9592 - DNA, 20 bp, Homo sapiens
cccgtcagcttgggggtgcc

SEQ ID NO: 9593 - DNA, 16 bp, Homo sapiens
cccgtcaggctgcctt

SEQ ID NO: 9594 - DNA, 18 bp, Homo sapiens
cccgtccctccttccctt

SEQ ID NO: 9595 - DNA, 19 bp, Homo sapiens
cccgtcctcagccccctct

SEQ ID NO: 9596 - DNA, 15 bp, Homo sapiens
cccgtcggacagcca

SEQ ID NO: 9597 - DNA, 18 bp, Homo sapiens
cccgtcggacagccacag

SEQ ID NO: 9598 - DNA, 21 bp, Homo sapiens
cccgtcggacagccacagcgg

SEQ ID NO: 9599 - DNA, 18 bp, Homo sapiens
cccgtctttgtaaggaga

SEQ ID NO: 9600 - DNA, 20 bp, Homo sapiens
cccgtctttgtaaggagacc

SEQ ID NO: 9601 - DNA, 21 bp, Homo sapiens
cccgtgagtaacttggctccg

SEQ ID NO: 9602 - DNA, 18 bp, Homo sapiens
cccgtggatctcatcgaa

SEQ ID NO: 9603 - DNA, 19 bp, Homo sapiens
cccgtggatctcatcgaag

SEQ ID NO: 9604 - DNA, 18 bp, Homo sapiens
cccgttattctcagatta

SEQ ID NO: 9605 - DNA, 19 bp, Homo sapiens
cccgttggcagaggtggcg

SEQ ID NO: 9606 - DNA, 18 bp, Homo sapiens
ccctaactaacggactat

SEQ ID NO: 9607 - DNA, 16 bp, Homo sapiens
ccctaagaaacacagc

SEQ ID NO: 9608 - DNA, 22 bp, Homo sapiens
ccctacctgacccatcagcaaa

SEQ ID NO: 9609 - DNA, 18 bp, Homo sapiens
ccctactctgcgggcggc

SEQ ID NO: 9610 - DNA, 19 bp, Homo sapiens
ccctagaagggaaaaggac

SEQ ID NO: 9611 - DNA, 18 bp, Homo sapiens
ccctaggatctgtgactg

SEQ ID NO: 9612 - DNA, 18 bp, Homo sapiens
ccctaggggcttgcagga

SEQ ID NO: 9613 - DNA, 22 bp, Homo sapiens
ccctagtccaacatggcggcgc

SEQ ID NO: 9614 - DNA, 19 bp, Homo sapiens
ccctcaatcaaggcggacg

SEQ ID NO: 9615 - DNA, 22 bp, Homo sapiens
ccctcaggtctcattctgtgcc

SEQ ID NO: 9616 - DNA, 18 bp, Homo sapiens
ccctcagtgcgcatccgg

SEQ ID NO: 9617 - DNA, 21 bp, Homo sapiens
ccctcccactctctctttccg

SEQ ID NO: 9618 - DNA, 18 bp, Homo sapiens
ccctcccggccaagatgt

SEQ ID NO: 9619 - DNA, 18 bp, Homo sapiens
ccctccgagtgccccccg

SEQ ID NO: 9620 - DNA, 18 bp, Homo sapiens
ccctccgggaggtcgggc

SEQ ID NO: 9621 - DNA, 20 bp, Homo sapiens
ccctccgggaggtcgggctg

SEQ ID NO: 9622 - DNA, 18 bp, Homo sapiens
ccctcctcccccctccac

SEQ ID NO: 9623 - DNA, 18 bp, Homo sapiens
ccctcgcttcccgacgtt

SEQ ID NO: 9624 - DNA, 17 bp, Homo sapiens
ccctcggagagctctgc

SEQ ID NO: 9625 - DNA, 19 bp, Homo sapiens
ccctcggagcaggagctgg

SEQ ID NO: 9626 - DNA, 18 bp, Homo sapiens
ccctcggcgctgacaggc

SEQ ID NO: 9627 - DNA, 16 bp, Homo sapiens
ccctcgggggcggctg

SEQ ID NO: 9628 - DNA, 23 bp, Homo sapiens
gggcgtctgctgccgggggcgcc

SEQ ID NO: 9629 - DNA, 18 bp, Homo sapiens
gggcgtgcactcgccctt

SEQ ID NO: 9630 - DNA, 23 bp, Homo sapiens
gggcgtgctgctcgtccggcccc

SEQ ID NO: 9631 - DNA, 18 bp, Homo sapiens
gggcgtgggaacggggtt

SEQ ID NO: 9632 - DNA, 18 bp, Homo sapiens
gggcgttccctcgggttg

SEQ ID NO: 9633 - DNA, 18 bp, Homo sapiens
gggctagagaagagaggc

SEQ ID NO: 9634 - DNA, 18 bp, Homo sapiens
gggctaggtgagaggcca

SEQ ID NO: 9635 - DNA, 18 bp, Homo sapiens
gggctataaaaggggtga

SEQ ID NO: 9636 - DNA, 18 bp, Homo sapiens
gggctatggcggcgagca

SEQ ID NO: 9637 - DNA, 20 bp, Homo sapiens
gggctcagagttgcactgag

SEQ ID NO: 9638 - DNA, 18 bp, Homo sapiens
gggctcccgggagacgcc

SEQ ID NO: 9639 - DNA, 18 bp, Homo sapiens
gggctccgagatggtcag

SEQ ID NO: 9640 - DNA, 19 bp, Homo sapiens
gggctccgagatggtcaga

SEQ ID NO: 9641 - DNA, 17 bp, Homo sapiens
gggctccgtcagtttcc

SEQ ID NO: 9642 - DNA, 19 bp, Homo sapiens
gggctccgtcagtttcctc

SEQ ID NO: 9643 - DNA, 19 bp, Homo sapiens
gggctccgtggcagccccc

SEQ ID NO: 9644 - DNA, 20 bp, Homo sapiens
gggctcctcggcggctactg

SEQ ID NO: 9645 - DNA, 18 bp, Homo sapiens
gggctcctgttgcaatgg

SEQ ID NO: 9646 - DNA, 19 bp, Homo sapiens
gggctcctgttgcaatggc

SEQ ID NO: 9647 - DNA, 20 bp, Homo sapiens
gggctcctgttgcaatggcg

SEQ ID NO: 9648 - DNA, 21 bp, Homo sapiens
gggctcgcggggagccgggct

SEQ ID NO: 9649 - DNA, 20 bp, Homo sapiens
gggctcggacgagtacggag

SEQ ID NO: 9650 - DNA, 18 bp, Homo sapiens
gggctcggctggggcccg

SEQ ID NO: 9651 - DNA, 17 bp, Homo sapiens
gggctcgggatcgacgg

SEQ ID NO: 9652 - DNA, 18 bp, Homo sapiens
gggctcggtcgggcgctg

SEQ ID NO: 9653 - DNA, 19 bp, Homo sapiens
gggctcgtagatttggttg

SEQ ID NO: 9654 - DNA, 18 bp, Homo sapiens
gggctctctggaggccgc

SEQ ID NO: 9655 - DNA, 18 bp, Homo sapiens
gggctctggaagcttccg

SEQ ID NO: 9656 - DNA, 16 bp, Homo sapiens
gggctgacggggtggc

SEQ ID NO: 9657 - DNA, 21 bp, Homo sapiens
gggctgagaagccaggacggc

SEQ ID NO: 9658 - DNA, 19 bp, Homo sapiens
gggctgagcgcagaagcgg

SEQ ID NO: 9659 - DNA, 23 bp, Homo sapiens
gggctgaggacggcgactgcgcc

SEQ ID NO: 9660 - DNA, 18 bp, Homo sapiens
gggctgaggcggcccagc

SEQ ID NO: 9661 - DNA, 18 bp, Homo sapiens
gggctgcgcgcagcggca

SEQ ID NO: 9662 - DNA, 23 bp, Homo sapiens
gggctgcgctgggcttgccggga

SEQ ID NO: 9663 - DNA, 18 bp, Homo sapiens
gggctgcggaggaccgac

SEQ ID NO: 9664 - DNA, 23 bp, Homo sapiens
gggctgcggcgtcagccttcttc

SEQ ID NO: 9665 - DNA, 18 bp, Homo sapiens
gggctgcgtgcaggagga

SEQ ID NO: 9666 - DNA, 18 bp, Homo sapiens
gggctgctggcggctctg

SEQ ID NO: 9667 - DNA, 20 bp, Homo sapiens
gggctgctggcggctctgca

SEQ ID NO: 9668 - DNA, 19 bp, Homo sapiens
gggctggcggagatggagg

SEQ ID NO: 9669 - DNA, 17 bp, Homo sapiens
gggctgggaatagccgc

SEQ ID NO: 9670 - DNA, 18 bp, Homo sapiens
gggctgggagcaacgcga

SEQ ID NO: 9671 - DNA, 18 bp, Homo sapiens
gggctgggatccaaaagc

SEQ ID NO: 9672 - DNA, 18 bp, Homo sapiens
gggctgggcttagcctac

SEQ ID NO: 9673 - DNA, 19 bp, Homo sapiens
gggctggggtgcccagcgt

SEQ ID NO: 9674 - DNA, 18 bp, Homo sapiens
gggctgggtatgaaaggg

SEQ ID NO: 9675 - DNA, 19 bp, Homo sapiens
gggctggtagtcctgccgc

SEQ ID NO: 9676 - DNA, 23 bp, Homo sapiens
gggctgtagccgggcgttgagca

SEQ ID NO: 9677 - DNA, 17 bp, Homo sapiens
gggctgtgaggtgctcg

SEQ ID NO: 9678 - DNA, 19 bp, Homo sapiens
gggctgtgtttgaggccgg

SEQ ID NO: 9679 - DNA, 19 bp, Homo sapiens
gggctgtttggcgggtgag

SEQ ID NO: 9680 - DNA, 17 bp, Homo sapiens
gggcttaaggaagtaaa

SEQ ID NO: 9681 - DNA, 18 bp, Homo sapiens
gggcttcggtcgcaccag

SEQ ID NO: 9682 - DNA, 18 bp, Homo sapiens
gggcttgcagacgaggta

SEQ ID NO: 9683 - DNA, 17 bp, Homo sapiens
gggcttgcgtgcggctc

SEQ ID NO: 9684 - DNA, 17 bp, Homo sapiens
gggctttccgttctcca

SEQ ID NO: 9685 - DNA, 16 bp, Homo sapiens
ccctcggtcggacggg

SEQ ID NO: 9686 - DNA, 20 bp, Homo sapiens
ccctctccagcgctctgggc

SEQ ID NO: 9687 - DNA, 16 bp, Homo sapiens
ccctctcccagccaaa

SEQ ID NO: 9688 - DNA, 18 bp, Homo sapiens
ccctctctcagtcggagg

SEQ ID NO: 9689 - DNA, 23 bp, Homo sapiens
ccctctcttcccctccctcccca

SEQ ID NO: 9690 - DNA, 20 bp, Homo sapiens
ccctgactgccgaggaaacg

SEQ ID NO: 9691 - DNA, 24 bp, Homo sapiens
ccctgaggacggtgagacggccgc

SEQ ID NO: 9692 - DNA, 18 bp, Homo sapiens
ccctgcagggcgggactt

SEQ ID NO: 9693 - DNA, 21 bp, Homo sapiens
ccctgcagggcgggacttcga

SEQ ID NO: 9694 - DNA, 22 bp, Homo sapiens
ccctgcagttgtttgggctgtc

SEQ ID NO: 9695 - DNA, 21 bp, Homo sapiens
ccctgcccgcccgccagctcg

SEQ ID NO: 9696 - DNA, 18 bp, Homo sapiens
ccctgcgcacgcgcatgg

SEQ ID NO: 9697 - DNA, 16 bp, Homo sapiens
ccctgcggaacctcgg

SEQ ID NO: 9698 - DNA, 17 bp, Homo sapiens
ccctgcggaacctcggc

SEQ ID NO: 9699 - DNA, 17 bp, Homo sapiens
ccctgcggaccggacag

SEQ ID NO: 9700 - DNA, 18 bp, Homo sapiens
ccctgcggcggcgcggct

SEQ ID NO: 9701 - DNA, 15 bp, Homo sapiens
ccctgcggcgggacg

SEQ ID NO: 9702 - DNA, 19 bp, Homo sapiens
ccctgcgtggctgggctgc

SEQ ID NO: 9703 - DNA, 19 bp, Homo sapiens
ccctgctgcggactgtcct

SEQ ID NO: 9704 - DNA, 17 bp, Homo sapiens
ccctgctgggcggctgg

SEQ ID NO: 9705 - DNA, 21 bp, Homo sapiens
ccctgctgggcggctggacct

SEQ ID NO: 9706 - DNA, 18 bp, Homo sapiens
ccctgcttcgccgccgcc

SEQ ID NO: 9707 - DNA, 20 bp, Homo sapiens
ccctggaacggctcaggcgg

SEQ ID NO: 9708 - DNA, 21 bp, Homo sapiens
ccctggatcgggtgaaggtac

SEQ ID NO: 9709 - DNA, 21 bp, Homo sapiens
ccctggcgctgggccgggggc

SEQ ID NO: 9710 - DNA, 21 bp, Homo sapiens
ccctggcgcttccttcttctc

SEQ ID NO: 9711 - DNA, 18 bp, Homo sapiens
ccctggcggagcagagac

SEQ ID NO: 9712 - DNA, 16 bp, Homo sapiens
ccctgggcagcagcgg

SEQ ID NO: 9713 - DNA, 18 bp, Homo sapiens
ccctgggcgcccgtcgga

SEQ ID NO: 9714 - DNA, 18 bp, Homo sapiens
ccctgggctgcaggaggt

SEQ ID NO: 9715 - DNA, 20 bp, Homo sapiens
ccctggtgaggtgtagcggc

SEQ ID NO: 9716 - DNA, 19 bp, Homo sapiens
ccctgtaagtggctgcggc

SEQ ID NO: 9717 - DNA, 16 bp, Homo sapiens
ccctgtcctcggatca

SEQ ID NO: 9718 - DNA, 17 bp, Homo sapiens
ccctgtcggaagcaact

SEQ ID NO: 9719 - DNA, 18 bp, Homo sapiens
ccctgtcggaagcaactg

SEQ ID NO: 9720 - DNA, 19 bp, Homo sapiens
ccctgtgggtggacgtggt

SEQ ID NO: 9721 - DNA, 18 bp, Homo sapiens
ccctgtgtgtcggaaaga

SEQ ID NO: 9722 - DNA, 19 bp, Homo sapiens
ccctgttccagcaaacgca

SEQ ID NO: 9723 - DNA, 18 bp, Homo sapiens
cccttcccctaaagtgag

SEQ ID NO: 9724 - DNA, 21 bp, Homo sapiens
cccttcccgtcggtcgggccg

SEQ ID NO: 9725 - DNA, 19 bp, Homo sapiens
cccttgacgcgtcaggttg

SEQ ID NO: 9726 - DNA, 18 bp, Homo sapiens
cccttggcgcggaggctg

SEQ ID NO: 9727 - DNA, 15 bp, Homo sapiens
ccctttcgggcgcca

SEQ ID NO: 9728 - DNA, 18 bp, Homo sapiens
ccctttctttttgaggaa

SEQ ID NO: 9729 - DNA, 19 bp, Homo sapiens
ccctttctttttgaggaag

SEQ ID NO: 9730 - DNA, 22 bp, Homo sapiens
ccctttgctcccctggcgactg

SEQ ID NO: 9731 - DNA, 17 bp, Homo sapiens
cccttttcttccgcacg

SEQ ID NO: 9732 - DNA, 20 bp, Homo sapiens
ccgaaatctgagggtgatcg

SEQ ID NO: 9733 - DNA, 22 bp, Homo sapiens
ccgaagagggggtcgaggagag

SEQ ID NO: 9734 - DNA, 14 bp, Homo sapiens
ccgaagcgtcggac

SEQ ID NO: 9735 - DNA, 18 bp, Homo sapiens
ccgaagctcggctcgtga

SEQ ID NO: 9736 - DNA, 18 bp, Homo sapiens
ccgaaggactaagtggtg

SEQ ID NO: 9737 - DNA, 19 bp, Homo sapiens
ccgaagggaccaccgggaa

SEQ ID NO: 9738 - DNA, 22 bp, Homo sapiens
ccgacagtggaggcttaggcac

SEQ ID NO: 9739 - DNA, 17 bp, Homo sapiens
ccgaccaccggaaatta

SEQ ID NO: 9740 - DNA, 18 bp, Homo sapiens
ccgaccacgcgttaccgc

SEQ ID NO: 9741 - DNA, 18 bp, Homo sapiens
ccgaccactggggcccct

SEQ ID NO: 9742 - DNA, 16 bp, Homo sapiens
gggctttgcacccggc

SEQ ID NO: 9743 - DNA, 18 bp, Homo sapiens
gggctttgcacccggcgg

SEQ ID NO: 9744 - DNA, 19 bp, Homo sapiens
gggctttgcacccggcggc

SEQ ID NO: 9745 - DNA, 24 bp, Homo sapiens
gggctttgcgcgcgcctggccggc

SEQ ID NO: 9746 - DNA, 17 bp, Homo sapiens
gggctttgggctgtagg

SEQ ID NO: 9747 - DNA, 19 bp, Homo sapiens
ggggaaactggaagatgaa

SEQ ID NO: 9748 - DNA, 16 bp, Homo sapiens
ggggaaagggaagcgg

SEQ ID NO: 9749 - DNA, 17 bp, Homo sapiens
ggggaaagggaagcgga

SEQ ID NO: 9750 - DNA, 20 bp, Homo sapiens
ggggaacaggacgcgcgtga

SEQ ID NO: 9751 - DNA, 20 bp, Homo sapiens
ggggaactgatggcgttcct

SEQ ID NO: 9752 - DNA, 17 bp, Homo sapiens
ggggaagaggggcggag

SEQ ID NO: 9753 - DNA, 21 bp, Homo sapiens
ggggaagccatcggacgtcgg

SEQ ID NO: 9754 - DNA, 19 bp, Homo sapiens
ggggaaggagaaacctcat

SEQ ID NO: 9755 - DNA, 20 bp, Homo sapiens
ggggaaggaggagaagcgct

SEQ ID NO: 9756 - DNA, 18 bp, Homo sapiens
ggggaaggaggcgggctg

SEQ ID NO: 9757 - DNA, 17 bp, Homo sapiens
ggggaaggagtttccgg

SEQ ID NO: 9758 - DNA, 18 bp, Homo sapiens
ggggaaggggagcgaggt

SEQ ID NO: 9759 - DNA, 18 bp, Homo sapiens
ggggaatcgcgtaatggc

SEQ ID NO: 9760 - DNA, 18 bp, Homo sapiens
ggggaatgtgaagagctc

SEQ ID NO: 9761 - DNA, 20 bp, Homo sapiens
ggggaattctgctggcgctg

SEQ ID NO: 9762 - DNA, 17 bp, Homo sapiens
ggggacaccagtagccg

SEQ ID NO: 9763 - DNA, 18 bp, Homo sapiens
ggggacagcgcgagccgc

SEQ ID NO: 9764 - DNA, 18 bp, Homo sapiens
ggggacagtttgttgtgc

SEQ ID NO: 9765 - DNA, 17 bp, Homo sapiens
ggggacgaggacgacga

SEQ ID NO: 9766 - DNA, 18 bp, Homo sapiens
ggggacgcagggagcgac

SEQ ID NO: 9767 - DNA, 18 bp, Homo sapiens
ggggacggagagacggag

SEQ ID NO: 9768 - DNA, 18 bp, Homo sapiens
ggggacgtaacggaggca

SEQ ID NO: 9769 - DNA, 18 bp, Homo sapiens
ggggacgtgggaaagtgt

SEQ ID NO: 9770 - DNA, 18 bp, Homo sapiens
ggggactaaggcgtcggt

SEQ ID NO: 9771 - DNA, 20 bp, Homo sapiens
ggggactagcagcgaatatg

SEQ ID NO: 9772 - DNA, 18 bp, Homo sapiens
ggggactaggtgaagcgg

SEQ ID NO: 9773 - DNA, 18 bp, Homo sapiens
ggggactgaaggtgtggg

SEQ ID NO: 9774 - DNA, 21 bp, Homo sapiens
ggggactgcacgtctcacttc

SEQ ID NO: 9775 - DNA, 19 bp, Homo sapiens
ggggactggccgcggaccc

SEQ ID NO: 9776 - DNA, 22 bp, Homo sapiens
ggggactgggcgccggcgggga

SEQ ID NO: 9777 - DNA, 18 bp, Homo sapiens
ggggagaaggggaccgca

SEQ ID NO: 9778 - DNA, 18 bp, Homo sapiens
ggggagaagggtcagccc

SEQ ID NO: 9779 - DNA, 18 bp, Homo sapiens
ggggagattcgtggggac

SEQ ID NO: 9780 - DNA, 18 bp, Homo sapiens
ggggagccggaggaggtg

SEQ ID NO: 9781 - DNA, 21 bp, Homo sapiens
ggggaggaagaggagaaaggc

SEQ ID NO: 9782 - DNA, 21 bp, Homo sapiens
ggggaggcaggctggcaggtg

SEQ ID NO: 9783 - DNA, 18 bp, Homo sapiens
ggggagtgtgacccaccc

SEQ ID NO: 9784 - DNA, 22 bp, Homo sapiens
ggggatctcttggagacggcga

SEQ ID NO: 9785 - DNA, 19 bp, Homo sapiens
ggggatctgagctggcagg

SEQ ID NO: 9786 - DNA, 18 bp, Homo sapiens
ggggatgagaaactacgg

SEQ ID NO: 9787 - DNA, 19 bp, Homo sapiens
ggggatgagaaactacggc

SEQ ID NO: 9788 - DNA, 19 bp, Homo sapiens
ggggatggaacgttgctag

SEQ ID NO: 9789 - DNA, 19 bp, Homo sapiens
ggggattcaacatggcggc

SEQ ID NO: 9790 - DNA, 21 bp, Homo sapiens
ggggattgtgggaaaagatgg

SEQ ID NO: 9791 - DNA, 18 bp, Homo sapiens
ggggcacgggcacccccg

SEQ ID NO: 9792 - DNA, 18 bp, Homo sapiens
ggggcactttcgtcttag

SEQ ID NO: 9793 - DNA, 19 bp, Homo sapiens
ggggcagaagcctcccatt

SEQ ID NO: 9794 - DNA, 16 bp, Homo sapiens
ggggcagagcgcaggg

SEQ ID NO: 9795 - DNA, 17 bp, Homo sapiens
ggggcagaggagcatcc

SEQ ID NO: 9796 - DNA, 19 bp, Homo sapiens
ggggcagaggagcatcccg

SEQ ID NO: 9797 - DNA, 22 bp, Homo sapiens
ggggcagagttggtggcgtgag

SEQ ID NO: 9798 - DNA, 18 bp, Homo sapiens
ggggcagccctttgtctg

SEQ ID NO: 9799 - DNA, 16 bp, Homo sapiens
ccgaccagtctgggca

SEQ ID NO: 9800 - DNA, 22 bp, Homo sapiens
ccgacccgcgggcgaggccggg

SEQ ID NO: 9801 - DNA, 21 bp, Homo sapiens
ccgacccgggattagttggtt

SEQ ID NO: 9802 - DNA, 19 bp, Homo sapiens
ccgaccctgcactgctgcc

SEQ ID NO: 9803 - DNA, 20 bp, Homo sapiens
ccgacctgcctgggccgaag

SEQ ID NO: 9804 - DNA, 14 bp, Homo sapiens
ccgacggggagtcc

SEQ ID NO: 9805 - DNA, 20 bp, Homo sapiens
ccgactaagcagaagaaaga

SEQ ID NO: 9806 - DNA, 19 bp, Homo sapiens
ccgactcgtgggtcccgaa

SEQ ID NO: 9807 - DNA, 18 bp, Homo sapiens
ccgactctggaggaagac

SEQ ID NO: 9808 - DNA, 19 bp, Homo sapiens
ccgacttcggacatggcgc

SEQ ID NO: 9809 - DNA, 18 bp, Homo sapiens
ccgagacggcggcggcgc

SEQ ID NO: 9810 - DNA, 16 bp, Homo sapiens
ccgagactcagccaga

SEQ ID NO: 9811 - DNA, 21 bp, Homo sapiens
ccgagaggagaggacagctgg

SEQ ID NO: 9812 - DNA, 17 bp, Homo sapiens
ccgagaggtgtcacccc

SEQ ID NO: 9813 - DNA, 20 bp, Homo sapiens
ccgagcccagctacgcgacg

SEQ ID NO: 9814 - DNA, 19 bp, Homo sapiens
ccgagcccgggacccggag

SEQ ID NO: 9815 - DNA, 18 bp, Homo sapiens
ccgagccggagaagatgg

SEQ ID NO: 9816 - DNA, 18 bp, Homo sapiens
ccgaggaagctaaggctg

SEQ ID NO: 9817 - DNA, 18 bp, Homo sapiens
ccgaggattggctgttcc

SEQ ID NO: 9818 - DNA, 18 bp, Homo sapiens
ccgaggcggaggagcggc

SEQ ID NO: 9819 - DNA, 19 bp, Homo sapiens
ccgaggctggggcggctgg

SEQ ID NO: 9820 - DNA, 19 bp, Homo sapiens
ccgagggaacaagccccaa

SEQ ID NO: 9821 - DNA, 19 bp, Homo sapiens
ccgagggccgaaaccggaa

SEQ ID NO: 9822 - DNA, 18 bp, Homo sapiens
ccgaggtcagagacttaa

SEQ ID NO: 9823 - DNA, 18 bp, Homo sapiens
ccgaggtggaacgggcgg

SEQ ID NO: 9824 - DNA, 19 bp, Homo sapiens
ccgagtgcactgaagatgg

SEQ ID NO: 9825 - DNA, 23 bp, Homo sapiens
ccgagtgccccggccggggcctg

SEQ ID NO: 9826 - DNA, 18 bp, Homo sapiens
ccgagtggagagagcgag

SEQ ID NO: 9827 - DNA, 17 bp, Homo sapiens
ccgagtggcggctgcag

SEQ ID NO: 9828 - DNA, 18 bp, Homo sapiens
ccgagtgtcgggcgcggc

SEQ ID NO: 9829 - DNA, 18 bp, Homo sapiens
ccgagttccagcagtccg

SEQ ID NO: 9830 - DNA, 18 bp, Homo sapiens
ccgatgcggggctgtgcg

SEQ ID NO: 9831 - DNA, 18 bp, Homo sapiens
ccgattcctggcttttgc

SEQ ID NO: 9832 - DNA, 24 bp, Homo sapiens
ccgcaaaagcgctccggccaccgg

SEQ ID NO: 9833 - DNA, 18 bp, Homo sapiens
ccgcaaggtgcgcagtag

SEQ ID NO: 9834 - DNA, 19 bp, Homo sapiens
ccgcaccacacgggggagg

SEQ ID NO: 9835 - DNA, 21 bp, Homo sapiens
ccgcacggtagtagatggggg

SEQ ID NO: 9836 - DNA, 17 bp, Homo sapiens
ccgcagcaaacacatcc

SEQ ID NO: 9837 - DNA, 18 bp, Homo sapiens
ccgcagcagcggacggca

SEQ ID NO: 9838 - DNA, 21 bp, Homo sapiens
ccgcaggatggtgagtggatg

SEQ ID NO: 9839 - DNA, 22 bp, Homo sapiens
ccgcaggccccgccgtcgccac

SEQ ID NO: 9840 - DNA, 20 bp, Homo sapiens
ccgcagtcggcaaggagaga

SEQ ID NO: 9841 - DNA, 18 bp, Homo sapiens
ccgcagtgccgtagtagc

SEQ ID NO: 9842 - DNA, 18 bp, Homo sapiens
ccgcattgcagactgcgg

SEQ ID NO: 9843 - DNA, 18 bp, Homo sapiens
ccgccaaggggggaaagg

SEQ ID NO: 9844 - DNA, 19 bp, Homo sapiens
ccgccaaggggggaaagga

SEQ ID NO: 9845 - DNA, 18 bp, Homo sapiens
ccgccacaccggcccttc

SEQ ID NO: 9846 - DNA, 18 bp, Homo sapiens
ccgccaccgcatcgcgca

SEQ ID NO: 9847 - DNA, 20 bp, Homo sapiens
ccgccacgagagcccgggac

SEQ ID NO: 9848 - DNA, 24 bp, Homo sapiens
ccgccacgagagcccgggacgcgg

SEQ ID NO: 9849 - DNA, 19 bp, Homo sapiens
ccgccacttgattctggag

SEQ ID NO: 9850 - DNA, 21 bp, Homo sapiens
ccgccagcagagcgcaccggg

SEQ ID NO: 9851 - DNA, 16 bp, Homo sapiens
ccgccagcccagggca

SEQ ID NO: 9852 - DNA, 16 bp, Homo sapiens
ccgccaggagccttcc

SEQ ID NO: 9853 - DNA, 19 bp, Homo sapiens
ccgccatcctcttccgtga

SEQ ID NO: 9854 - DNA, 19 bp, Homo sapiens
ccgccatgtcggtgctggg

SEQ ID NO: 9855 - DNA, 18 bp, Homo sapiens
ccgccattttgcgggaag

SEQ ID NO: 9856 - DNA, 18 bp, Homo sapiens
ggggcaggtgctgggcgg

SEQ ID NO: 9857 - DNA, 18 bp, Homo sapiens
ggggcagtctctgcatat

SEQ ID NO: 9858 - DNA, 19 bp, Homo sapiens
ggggcagtctctgcatatc

SEQ ID NO: 9859 - DNA, 18 bp, Homo sapiens
ggggccaagatggcgacg

SEQ ID NO: 9860 - DNA, 18 bp, Homo sapiens
ggggccagcagccgtcta

SEQ ID NO: 9861 - DNA, 18 bp, Homo sapiens
ggggccagggacctcagt

SEQ ID NO: 9862 - DNA, 19 bp, Homo sapiens
ggggccccggggcgcccct

SEQ ID NO: 9863 - DNA, 17 bp, Homo sapiens
ggggcccgcgggcctgc

SEQ ID NO: 9864 - DNA, 23 bp, Homo sapiens
ggggccgacccgaggccacagtg

SEQ ID NO: 9865 - DNA, 21 bp, Homo sapiens
ggggccgaggccgcccgagcc

SEQ ID NO: 9866 - DNA, 16 bp, Homo sapiens
ggggccgcgacccctg

SEQ ID NO: 9867 - DNA, 18 bp, Homo sapiens
ggggccgtacggaggtgg

SEQ ID NO: 9868 - DNA, 19 bp, Homo sapiens
ggggccgtcgaggcggcgg

SEQ ID NO: 9869 - DNA, 18 bp, Homo sapiens
ggggcctcgctcgctccc

SEQ ID NO: 9870 - DNA, 24 bp, Homo sapiens
ggggcctgcggaggcgcgaggccc

SEQ ID NO: 9871 - DNA, 21 bp, Homo sapiens
ggggcgaagccgaggaagagc

SEQ ID NO: 9872 - DNA, 22 bp, Homo sapiens
ggggcgcaggggccatggtgcg

SEQ ID NO: 9873 - DNA, 17 bp, Homo sapiens
ggggcggagctcgcgat

SEQ ID NO: 9874 - DNA, 19 bp, Homo sapiens
ggggcggagtgaggcgcag

SEQ ID NO: 9875 - DNA, 23 bp, Homo sapiens
ggggcggcagtgagctcggccgg

SEQ ID NO: 9876 - DNA, 20 bp, Homo sapiens
ggggcgggatgtgggagcgg

SEQ ID NO: 9877 - DNA, 18 bp, Homo sapiens
ggggcggggagcggagct

SEQ ID NO: 9878 - DNA, 18 bp, Homo sapiens
ggggcggggaggaggagg

SEQ ID NO: 9879 - DNA, 18 bp, Homo sapiens
ggggcggtgcggtgcgga

SEQ ID NO: 9880 - DNA, 18 bp, Homo sapiens
ggggctcacggcctcgcc

SEQ ID NO: 9881 - DNA, 21 bp, Homo sapiens
ggggctccagcgggagaacga

SEQ ID NO: 9882 - DNA, 17 bp, Homo sapiens
ggggctctagtgaacag

SEQ ID NO: 9883 - DNA, 22 bp, Homo sapiens
ggggctctggcctaccggtgac

SEQ ID NO: 9884 - DNA, 19 bp, Homo sapiens
ggggctgagctgcggcggc

SEQ ID NO: 9885 - DNA, 19 bp, Homo sapiens
ggggctgaggtggagccgc

SEQ ID NO: 9886 - DNA, 24 bp, Homo sapiens
ggggctgcgctgggcttgccggga

SEQ ID NO: 9887 - DNA, 17 bp, Homo sapiens
ggggctgcggagcggcg

SEQ ID NO: 9888 - DNA, 19 bp, Homo sapiens
ggggctgctgaagccgcca

SEQ ID NO: 9889 - DNA, 21 bp, Homo sapiens
ggggctgctggcggctctgca

SEQ ID NO: 9890 - DNA, 22 bp, Homo sapiens
ggggctgggcccagcgaggtga

SEQ ID NO: 9891 - DNA, 18 bp, Homo sapiens
ggggctgtaaagggagaa

SEQ ID NO: 9892 - DNA, 17 bp, Homo sapiens
ggggctgtcgccgtacg

SEQ ID NO: 9893 - DNA, 21 bp, Homo sapiens
ggggctgtgccggagcagctg

SEQ ID NO: 9894 - DNA, 19 bp, Homo sapiens
ggggctgtggtgcggagag

SEQ ID NO: 9895 - DNA, 16 bp, Homo sapiens
ggggcttactgcggga

SEQ ID NO: 9896 - DNA, 18 bp, Homo sapiens
ggggcttcttctcctgaa

SEQ ID NO: 9897 - DNA, 18 bp, Homo sapiens
gggggaaaggagacgctt

SEQ ID NO: 9898 - DNA, 17 bp, Homo sapiens
gggggaagaggagcgtg

SEQ ID NO: 9899 - DNA, 18 bp, Homo sapiens
gggggacccagcgaaatg

SEQ ID NO: 9900 - DNA, 18 bp, Homo sapiens
gggggacgttcccaggac

SEQ ID NO: 9901 - DNA, 22 bp, Homo sapiens
gggggaggaagaggagaaaggc

SEQ ID NO: 9902 - DNA, 16 bp, Homo sapiens
gggggaggagttggag

SEQ ID NO: 9903 - DNA, 20 bp, Homo sapiens
gggggatggggatgttgaat

SEQ ID NO: 9904 - DNA, 18 bp, Homo sapiens
gggggcactttcgtctta

SEQ ID NO: 9905 - DNA, 17 bp, Homo sapiens
gggggcgggccggggga

SEQ ID NO: 9906 - DNA, 18 bp, Homo sapiens
gggggcgggggaggctca

SEQ ID NO: 9907 - DNA, 17 bp, Homo sapiens
ggggggaccaggggaag

SEQ ID NO: 9908 - DNA, 20 bp, Homo sapiens
ggggggagcgctggcgaggc

SEQ ID NO: 9909 - DNA, 18 bp, Homo sapiens
ggggggcggggctcgtgg

SEQ ID NO: 9910 - DNA, 18 bp, Homo sapiens
ggggggctgtgtgagtct

SEQ ID NO: 9911 - DNA, 18 bp, Homo sapiens
ggggggtggggcaggcga

SEQ ID NO: 9912 - DNA, 18 bp, Homo sapiens
gggggtcaggccaatcgg

SEQ ID NO: 9913 - DNA, 19 bp, Homo sapiens
ccgcccaagatggtgagtg

SEQ ID NO: 9914 - DNA, 18 bp, Homo sapiens
ccgccccgtggtggggcg

SEQ ID NO: 9915 - DNA, 18 bp, Homo sapiens
ccgcccgccgctgaggga

SEQ ID NO: 9916 - DNA, 17 bp, Homo sapiens
ccgcccggcgccagcga

SEQ ID NO: 9917 - DNA, 18 bp, Homo sapiens
ccgcccgggagatatccg

SEQ ID NO: 9918 - DNA, 18 bp, Homo sapiens
ccgcccgggcgtccggaa

SEQ ID NO: 9919 - DNA, 18 bp, Homo sapiens
ccgcccgtcgtacctgat

SEQ ID NO: 9920 - DNA, 18 bp, Homo sapiens
ccgcccgtctttgtaagg

SEQ ID NO: 9921 - DNA, 17 bp, Homo sapiens
ccgccctgagacggtgc

SEQ ID NO: 9922 - DNA, 16 bp, Homo sapiens
ccgccgagctgcgagc

SEQ ID NO: 9923 - DNA, 20 bp, Homo sapiens
ccgccgaggattcagcagcc

SEQ ID NO: 9924 - DNA, 21 bp, Homo sapiens
ccgccgaggcccggggcccca

SEQ ID NO: 9925 - DNA, 21 bp, Homo sapiens
ccgccgagtcggtggcggctg

SEQ ID NO: 9926 - DNA, 17 bp, Homo sapiens
ccgccgcaatgcaggtg

SEQ ID NO: 9927 - DNA, 18 bp, Homo sapiens
ccgccgcagctgccaaaa

SEQ ID NO: 9928 - DNA, 19 bp, Homo sapiens
ccgccgccagcagagcgca

SEQ ID NO: 9929 - DNA, 18 bp, Homo sapiens
ccgccgccatgtcgggct

SEQ ID NO: 9930 - DNA, 21 bp, Homo sapiens
ccgccgccgagtcgcgcggag

SEQ ID NO: 9931 - DNA, 18 bp, Homo sapiens
ccgccgccgccagatcgg

SEQ ID NO: 9932 - DNA, 18 bp, Homo sapiens
ccgccgccgcctcctggg

SEQ ID NO: 9933 - DNA, 23 bp, Homo sapiens
ccgccgccgctgccggacgcgca

SEQ ID NO: 9934 - DNA, 19 bp, Homo sapiens
ccgccgcctgtcagcgcgt

SEQ ID NO: 9935 - DNA, 18 bp, Homo sapiens
ccgccgccttagaacgcc

SEQ ID NO: 9936 - DNA, 18 bp, Homo sapiens
ccgccgcgcatcctcggc

SEQ ID NO: 9937 - DNA, 18 bp, Homo sapiens
ccgccgcggccggaggta

SEQ ID NO: 9938 - DNA, 20 bp, Homo sapiens
ccgccgcgggactgagacgg

SEQ ID NO: 9939 - DNA, 19 bp, Homo sapiens
ccgccgcgggcaggataca

SEQ ID NO: 9940 - DNA, 17 bp, Homo sapiens
ccgccgcggggccccgg

SEQ ID NO: 9941 - DNA, 17 bp, Homo sapiens
ccgccgcggtcgctcta

SEQ ID NO: 9942 - DNA, 21 bp, Homo sapiens
ccgccgctggcgcatggcggg

SEQ ID NO: 9943 - DNA, 17 bp, Homo sapiens
ccgccggcggttgcgcc

SEQ ID NO: 9944 - DNA, 17 bp, Homo sapiens
ccgccgggactcttggc

SEQ ID NO: 9945 - DNA, 20 bp, Homo sapiens
ccgccggtcgggccacctgc

SEQ ID NO: 9946 - DNA, 17 bp, Homo sapiens
ccgcctcactcagcggc

SEQ ID NO: 9947 - DNA, 18 bp, Homo sapiens
ccgcctcactcagcggcg

SEQ ID NO: 9948 - DNA, 20 bp, Homo sapiens
ccgcctcctcctcccatcca

SEQ ID NO: 9949 - DNA, 18 bp, Homo sapiens
ccgcctccttgtgacaga

SEQ ID NO: 9950 - DNA, 20 bp, Homo sapiens
ccgcctggtgcggccgcggc

SEQ ID NO: 9951 - DNA, 19 bp, Homo sapiens
ccgcgaagacttgaggtgc

SEQ ID NO: 9952 - DNA, 19 bp, Homo sapiens
ccgcgaagcctgagaggca

SEQ ID NO: 9953 - DNA, 18 bp, Homo sapiens
ccgcgaccacccggagtg

SEQ ID NO: 9954 - DNA, 16 bp, Homo sapiens
ccgcgagggggcccgg

SEQ ID NO: 9955 - DNA, 18 bp, Homo sapiens
ccgcgatggccgaacctg

SEQ ID NO: 9956 - DNA, 21 bp, Homo sapiens
ccgcgcagcgccagtcgcaga

SEQ ID NO: 9957 - DNA, 23 bp, Homo sapiens
ccgcgcaggaggacggagcccta

SEQ ID NO: 9958 - DNA, 21 bp, Homo sapiens
ccgcgcagtgcggaccctcgc

SEQ ID NO: 9959 - DNA, 17 bp, Homo sapiens
ccgcgcagttagggcat

SEQ ID NO: 9960 - DNA, 18 bp, Homo sapiens
ccgcgcgacgccgccgcc

SEQ ID NO: 9961 - DNA, 19 bp, Homo sapiens
ccgcgcgccgcgccgagcg

SEQ ID NO: 9962 - DNA, 18 bp, Homo sapiens
ccgcgcgctgggacaggc

SEQ ID NO: 9963 - DNA, 19 bp, Homo sapiens
ccgcgcggagcagcgcaac

SEQ ID NO: 9964 - DNA, 21 bp, Homo sapiens
ccgcgcgggacggagcttggc

SEQ ID NO: 9965 - DNA, 20 bp, Homo sapiens
ccgcgcgggcgtaggcgggg

SEQ ID NO: 9966 - DNA, 18 bp, Homo sapiens
ccgcgcgtgtggcagtcg

SEQ ID NO: 9967 - DNA, 20 bp, Homo sapiens
ccgcgcgtgtggcagtcgcg

SEQ ID NO: 9968 - DNA, 18 bp, Homo sapiens
ccgcggacacacgaggga

SEQ ID NO: 9969 - DNA, 18 bp, Homo sapiens
ccgcggacaccaggcagg

SEQ ID NO: 9970 - DNA, 18 bp, Homo sapiens
gggggtggagccagacag

SEQ ID NO: 9971 - DNA, 19 bp, Homo sapiens
gggggttccctggtccccg

SEQ ID NO: 9972 - DNA, 17 bp, Homo sapiens
ggggtaagagcgagcgg

SEQ ID NO: 9973 - DNA, 22 bp, Homo sapiens
ggggtaagatggctgcagtccg

SEQ ID NO: 9974 - DNA, 19 bp, Homo sapiens
ggggtagaagaaggaagtg

SEQ ID NO: 9975 - DNA, 20 bp, Homo sapiens
ggggtcacgaggcttcgtag

SEQ ID NO: 9976 - DNA, 16 bp, Homo sapiens
ggggtccgccggccct

SEQ ID NO: 9977 - DNA, 17 bp, Homo sapiens
ggggtccgccggccctg

SEQ ID NO: 9978 - DNA, 17 bp, Homo sapiens
ggggtcgggctcggccg

SEQ ID NO: 9979 - DNA, 18 bp, Homo sapiens
ggggtcgggctcggccgt

SEQ ID NO: 9980 - DNA, 17 bp, Homo sapiens
ggggtcttttcccaagg

SEQ ID NO: 9981 - DNA, 18 bp, Homo sapiens
ggggtgacatgagtgact

SEQ ID NO: 9982 - DNA, 21 bp, Homo sapiens
ggggtgcgcagcattcggcag

SEQ ID NO: 9983 - DNA, 18 bp, Homo sapiens
ggggtgcggaggtgtgca

SEQ ID NO: 9984 - DNA, 17 bp, Homo sapiens
ggggtgcggtcctggtc

SEQ ID NO: 9985 - DNA, 17 bp, Homo sapiens
ggggtggacaagtggcg

SEQ ID NO: 9986 - DNA, 20 bp, Homo sapiens
ggggtgggagtagcggattt

SEQ ID NO: 9987 - DNA, 21 bp, Homo sapiens
ggggtgggccaggctgtgggg

SEQ ID NO: 9988 - DNA, 16 bp, Homo sapiens
ggggtggggctatgcc

SEQ ID NO: 9989 - DNA, 17 bp, Homo sapiens
ggggtgtggacggtttg

SEQ ID NO: 9990 - DNA, 20 bp, Homo sapiens
ggggtgttcatctccgcgac

SEQ ID NO: 9991 - DNA, 21 bp, Homo sapiens
ggggttcgcacgccaagaacc

SEQ ID NO: 9992 - DNA, 18 bp, Homo sapiens
ggggttggtctttggaat

SEQ ID NO: 9993 - DNA, 18 bp, Homo sapiens
ggggttggtggcactatg

SEQ ID NO: 9994 - DNA, 16 bp, Homo sapiens
gggtaacaagatggcg

SEQ ID NO: 9995 - DNA, 18 bp, Homo sapiens
gggtaaggaatgcaccgt

SEQ ID NO: 9996 - DNA, 17 bp, Homo sapiens
gggtacccggagcacgg

SEQ ID NO: 9997 - DNA, 19 bp, Homo sapiens
gggtacctgagggacgcgc

SEQ ID NO: 9998 - DNA, 24 bp, Homo sapiens
gggtactggggcgtgcgtgaggcg

SEQ ID NO: 9999 - DNA, 18 bp, Homo sapiens
gggtagaagaaggaagtg

SEQ ID NO: 10000 - DNA, 19 bp, Homo sapiens
gggtagaagaaggaagtgt

SEQ ID NO: 10001 - DNA, 21 bp, Homo sapiens
gggtagctgcgcgcgggtggc

SEQ ID NO: 10002 - DNA, 18 bp, Homo sapiens
gggtatgaaagggaagtc

SEQ ID NO: 10003 - DNA, 19 bp, Homo sapiens
gggtcctcggtcggtacag

SEQ ID NO: 10004 - DNA, 18 bp, Homo sapiens
gggtcctgtgaaggcgag

SEQ ID NO: 10005 - DNA, 18 bp, Homo sapiens
gggtcgcatgcatgctcc

SEQ ID NO: 10006 - DNA, 19 bp, Homo sapiens
gggtcgctgacggctgtct

SEQ ID NO: 10007 - DNA, 19 bp, Homo sapiens
gggtcgctgccgcctccgc

SEQ ID NO: 10008 - DNA, 17 bp, Homo sapiens
gggtcggacggcgctag

SEQ ID NO: 10009 - DNA, 20 bp, Homo sapiens
gggtcgggccaagatggcgg

SEQ ID NO: 10010 - DNA, 16 bp, Homo sapiens
gggtcgggctctgtgt

SEQ ID NO: 10011 - DNA, 20 bp, Homo sapiens
gggtctacctgttttgggga

SEQ ID NO: 10012 - DNA, 19 bp, Homo sapiens
gggtctccagtagggctga

SEQ ID NO: 10013 - DNA, 17 bp, Homo sapiens
gggtctccgctcctgtg

SEQ ID NO: 10014 - DNA, 19 bp, Homo sapiens
gggtctgtggagagccggg

SEQ ID NO: 10015 - DNA, 18 bp, Homo sapiens
gggtcttctgacgtgccg

SEQ ID NO: 10016 - DNA, 18 bp, Homo sapiens
gggtgaacggagctttcg

SEQ ID NO: 10017 - DNA, 18 bp, Homo sapiens
gggtgacccggggagagg

SEQ ID NO: 10018 - DNA, 18 bp, Homo sapiens
gggtgactgcgggattcc

SEQ ID NO: 10019 - DNA, 18 bp, Homo sapiens
gggtgagaggaggctgca

SEQ ID NO: 10020 - DNA, 18 bp, Homo sapiens
gggtgagcgactgggcgc

SEQ ID NO: 10021 - DNA, 19 bp, Homo sapiens
gggtgcgcgggcaacttcc

SEQ ID NO: 10022 - DNA, 16 bp, Homo sapiens
gggtgcgggtgctgag

SEQ ID NO: 10023 - DNA, 17 bp, Homo sapiens
gggtgctggcgaagcgg

SEQ ID NO: 10024 - DNA, 18 bp, Homo sapiens
gggtggacaagtggcgtg

SEQ ID NO: 10025 - DNA, 17 bp, Homo sapiens
gggtggagccagacagt

SEQ ID NO: 10026 - DNA, 16 bp, Homo sapiens
gggtggagccgccgca

SEQ ID NO: 10027 - DNA, 18 bp, Homo sapiens
ccgcggacggcggagcgg

SEQ ID NO: 10028 - DNA, 18 bp, Homo sapiens
ccgcggacggtcttgggt

SEQ ID NO: 10029 - DNA, 21 bp, Homo sapiens
ccgcggagaaattgttggatc

SEQ ID NO: 10030 - DNA, 18 bp, Homo sapiens
ccgcggaggaagacagcg

SEQ ID NO: 10031 - DNA, 24 bp, Homo sapiens
ccgcggcaagatggcggcctgaac

SEQ ID NO: 10032 - DNA, 20 bp, Homo sapiens
ccgcggcagacggaagccga

SEQ ID NO: 10033 - DNA, 18 bp, Homo sapiens
ccgcggccagaaacttca

SEQ ID NO: 10034 - DNA, 20 bp, Homo sapiens
ccgcggcccggcgctctccg

SEQ ID NO: 10035 - DNA, 18 bp, Homo sapiens
ccgcggcgagcaggcgga

SEQ ID NO: 10036 - DNA, 20 bp, Homo sapiens
ccgcggcgcggcatactcag

SEQ ID NO: 10037 - DNA, 21 bp, Homo sapiens
ccgcggcggcggcagcagcag

SEQ ID NO: 10038 - DNA, 19 bp, Homo sapiens
ccgcggctgcatctcttca

SEQ ID NO: 10039 - DNA, 19 bp, Homo sapiens
ccgcggctgctggaagcgt

SEQ ID NO: 10040 - DNA, 18 bp, Homo sapiens
ccgcgggaccgggtttgc

SEQ ID NO: 10041 - DNA, 19 bp, Homo sapiens
ccgcgggagccggggctgc

SEQ ID NO: 10042 - DNA, 17 bp, Homo sapiens
ccgcgggagcctgcaga

SEQ ID NO: 10043 - DNA, 19 bp, Homo sapiens
ccgcgggccgggaagggcc

SEQ ID NO: 10044 - DNA, 19 bp, Homo sapiens
ccgcgggcgaggccgggta

SEQ ID NO: 10045 - DNA, 23 bp, Homo sapiens
ccgcggggaccatggagccggtg

SEQ ID NO: 10046 - DNA, 18 bp, Homo sapiens
ccgcggggaccgggcagg

SEQ ID NO: 10047 - DNA, 19 bp, Homo sapiens
ccgcggggtagtcggcgcg

SEQ ID NO: 10048 - DNA, 18 bp, Homo sapiens
ccgcgggtgagtgtttcc

SEQ ID NO: 10049 - DNA, 21 bp, Homo sapiens
ccgcggtcatgtgacacagcg

SEQ ID NO: 10050 - DNA, 20 bp, Homo sapiens
ccgcggtgccggctgggggc

SEQ ID NO: 10051 - DNA, 16 bp, Homo sapiens
ccgcgtcgacgccggc

SEQ ID NO: 10052 - DNA, 20 bp, Homo sapiens
ccgcgtctctgggcttttgc

SEQ ID NO: 10053 - DNA, 17 bp, Homo sapiens
ccgcgtctgcacgggtc

SEQ ID NO: 10054 - DNA, 22 bp, Homo sapiens
ccgcgtgcgcgccctgcgggag

SEQ ID NO: 10055 - DNA, 20 bp, Homo sapiens
ccgcgtggctggaagacatg

SEQ ID NO: 10056 - DNA, 17 bp, Homo sapiens
ccgcgtttggcgctcgg

SEQ ID NO: 10057 - DNA, 18 bp, Homo sapiens
ccgctccaggtccgggac

SEQ ID NO: 10058 - DNA, 22 bp, Homo sapiens
ccgctcccctgtgaggctgcgg

SEQ ID NO: 10059 - DNA, 18 bp, Homo sapiens
ccgctccggactcacgtg

SEQ ID NO: 10060 - DNA, 18 bp, Homo sapiens
ccgctccgggcccctggc

SEQ ID NO: 10061 - DNA, 16 bp, Homo sapiens
ccgctccggtctgtgg

SEQ ID NO: 10062 - DNA, 20 bp, Homo sapiens
ccgctgcaagatggaaggaa

SEQ ID NO: 10063 - DNA, 23 bp, Homo sapiens
ccgctgcaggccaccatgaaccg

SEQ ID NO: 10064 - DNA, 19 bp, Homo sapiens
ccgctgcagtctggagccc

SEQ ID NO: 10065 - DNA, 22 bp, Homo sapiens
ccgctgcagtctgtgcaggtct

SEQ ID NO: 10066 - DNA, 18 bp, Homo sapiens
ccgctgcggagtgaacgg

SEQ ID NO: 10067 - DNA, 19 bp, Homo sapiens
ccgctgcggagtgaacggt

SEQ ID NO: 10068 - DNA, 20 bp, Homo sapiens
ccgctgcggagtgaacggtg

SEQ ID NO: 10069 - DNA, 21 bp, Homo sapiens
ccgctgcggagtgaacggtgt

SEQ ID NO: 10070 - DNA, 18 bp, Homo sapiens
ccgctgcgggcccgctcc

SEQ ID NO: 10071 - DNA, 18 bp, Homo sapiens
ccgctgctggagtacgag

SEQ ID NO: 10072 - DNA, 19 bp, Homo sapiens
ccgctgctgtggcaaagga

SEQ ID NO: 10073 - DNA, 16 bp, Homo sapiens
ccgctggagcccgggt

SEQ ID NO: 10074 - DNA, 20 bp, Homo sapiens
ccgctggagccgcagccgac

SEQ ID NO: 10075 - DNA, 16 bp, Homo sapiens
ccgctggagtgatggc

SEQ ID NO: 10076 - DNA, 19 bp, Homo sapiens
ccgctggagtgatggctgc

SEQ ID NO: 10077 - DNA, 19 bp, Homo sapiens
ccgctggcctggcaggtga

SEQ ID NO: 10078 - DNA, 18 bp, Homo sapiens
ccgctgtaggggaggtcc

SEQ ID NO: 10079 - DNA, 19 bp, Homo sapiens
ccgctgtggttgctgtccg

SEQ ID NO: 10080 - DNA, 17 bp, Homo sapiens
ccgctgtgtgtctcggg

SEQ ID NO: 10081 - DNA, 18 bp, Homo sapiens
ccgctgttttctgtccca

SEQ ID NO: 10082 - DNA, 18 bp, Homo sapiens
ccgcttcctgtccgactg

SEQ ID NO: 10083 - DNA, 18 bp, Homo sapiens
ccggaaagagaaggacta

SEQ ID NO: 10084 - DNA, 19 bp, Homo sapiens
gggtggcagcggccatgga

SEQ ID NO: 10085 - DNA, 19 bp, Homo sapiens
gggtggcgcacgaccaggg

SEQ ID NO: 10086 - DNA, 19 bp, Homo sapiens
gggtggctccgtgcggcca

SEQ ID NO: 10087 - DNA, 18 bp, Homo sapiens
gggtggctggcggttccg

SEQ ID NO: 10088 - DNA, 20 bp, Homo sapiens
gggtggctgtgggggcgggg

SEQ ID NO: 10089 - DNA, 24 bp, Homo sapiens
gggtgggaggtggaactagtcgga

SEQ ID NO: 10090 - DNA, 20 bp, Homo sapiens
gggtggggccaagtggcgcg

SEQ ID NO: 10091 - DNA, 21 bp, Homo sapiens
gggtggggctaggcgctgcga

SEQ ID NO: 10092 - DNA, 18 bp, Homo sapiens
gggtggtttgcttaggtg

SEQ ID NO: 10093 - DNA, 17 bp, Homo sapiens
gggtgtcggcgagtgtg

SEQ ID NO: 10094 - DNA, 18 bp, Homo sapiens
gggtgtgagctgcgccga

SEQ ID NO: 10095 - DNA, 16 bp, Homo sapiens
gggtgtggacggtttg

SEQ ID NO: 10096 - DNA, 22 bp, Homo sapiens
gggtgtggctgcttcccggcct

SEQ ID NO: 10097 - DNA, 18 bp, Homo sapiens
gggtgttgggtgctagtc

SEQ ID NO: 10098 - DNA, 18 bp, Homo sapiens
gggttacccctgcagcga

SEQ ID NO: 10099 - DNA, 18 bp, Homo sapiens
gggttagccgcgcaggtg

SEQ ID NO: 10100 - DNA, 21 bp, Homo sapiens
gggttagcggagcacgggcaa

SEQ ID NO: 10101 - DNA, 18 bp, Homo sapiens
gggttaggaagcggatct

SEQ ID NO: 10102 - DNA, 16 bp, Homo sapiens
gggttatggcccttgc

SEQ ID NO: 10103 - DNA, 16 bp, Homo sapiens
gggttcatgtagggag

SEQ ID NO: 10104 - DNA, 20 bp, Homo sapiens
gggttgactggaggcggagg

SEQ ID NO: 10105 - DNA, 18 bp, Homo sapiens
gggttgctaggcggagtc

SEQ ID NO: 10106 - DNA, 18 bp, Homo sapiens
gggttgctttccaaaatg

SEQ ID NO: 10107 - DNA, 16 bp, Homo sapiens
gggttggagccagcga

SEQ ID NO: 10108 - DNA, 18 bp, Homo sapiens
gggttggatgccagggtg

SEQ ID NO: 10109 - DNA, 20 bp, Homo sapiens
gggttggcgactgaaggcgg

SEQ ID NO: 10110 - DNA, 18 bp, Homo sapiens
gggttgtggttggtgtgc

SEQ ID NO: 10111 - DNA, 18 bp, Homo sapiens
gggtttcggttggaggac

SEQ ID NO: 10112 - DNA, 20 bp, Homo sapiens
gggtttgacggaaggagcgg

SEQ ID NO: 10113 - DNA, 21 bp, Homo sapiens
gggtttggttttgctccgccc

SEQ ID NO: 10114 - DNA, 20 bp, Homo sapiens
ggtaaacagacatggccggc

SEQ ID NO: 10115 - DNA, 18 bp, Homo sapiens
ggtaaagaagtcatggcg

SEQ ID NO: 10116 - DNA, 18 bp, Homo sapiens
ggtaactcaggcgccggg

SEQ ID NO: 10117 - DNA, 19 bp, Homo sapiens
ggtaagggcgggaagggtt

SEQ ID NO: 10118 - DNA, 15 bp, Homo sapiens
ggtaagttccgacct

SEQ ID NO: 10119 - DNA, 20 bp, Homo sapiens
ggtaccatgaggcgccggta

SEQ ID NO: 10120 - DNA, 18 bp, Homo sapiens
ggtaccggcgttttctta

SEQ ID NO: 10121 - DNA, 21 bp, Homo sapiens
ggtaccggcgttttcttaagc

SEQ ID NO: 10122 - DNA, 18 bp, Homo sapiens
ggtaccgtctgggcgccg

SEQ ID NO: 10123 - DNA, 18 bp, Homo sapiens
ggtactgtggcagcagtc

SEQ ID NO: 10124 - DNA, 16 bp, Homo sapiens
ggtagcaacagtgggc

SEQ ID NO: 10125 - DNA, 19 bp, Homo sapiens
ggtagcactcgggccggcg

SEQ ID NO: 10126 - DNA, 21 bp, Homo sapiens
ggtagccggccgggcctggga

SEQ ID NO: 10127 - DNA, 20 bp, Homo sapiens
ggtaggaacatggcggatcg

SEQ ID NO: 10128 - DNA, 21 bp, Homo sapiens
ggtagtgggatgggggtcccg

SEQ ID NO: 10129 - DNA, 18 bp, Homo sapiens
ggtagtggggcgcgggga

SEQ ID NO: 10130 - DNA, 17 bp, Homo sapiens
ggtatacgggtagggcg

SEQ ID NO: 10131 - DNA, 18 bp, Homo sapiens
ggtatacgggtagggcgc

SEQ ID NO: 10132 - DNA, 18 bp, Homo sapiens
ggtatgtgggcgggaggc

SEQ ID NO: 10133 - DNA, 16 bp, Homo sapiens
ggtcacgtgaggctta

SEQ ID NO: 10134 - DNA, 18 bp, Homo sapiens
ggtcagggtccgcgatct

SEQ ID NO: 10135 - DNA, 18 bp, Homo sapiens
ggtcaggtgaccgcggcg

SEQ ID NO: 10136 - DNA, 16 bp, Homo sapiens
ggtccccgcgaggggg

SEQ ID NO: 10137 - DNA, 17 bp, Homo sapiens
ggtccccgcgagggggc

SEQ ID NO: 10138 - DNA, 19 bp, Homo sapiens
ggtccctgagtaggtgagg

SEQ ID NO: 10139 - DNA, 21 bp, Homo sapiens
ggtccggagcaggctcccgga

SEQ ID NO: 10140 - DNA, 18 bp, Homo sapiens
ggtccggcgccgaggttc

SEQ ID NO: 10141 - DNA, 23 bp, Homo sapiens
ccggaaagaggaagcggaagtga

SEQ ID NO: 10142 - DNA, 19 bp, Homo sapiens
ccggaacggtaagggcagg

SEQ ID NO: 10143 - DNA, 18 bp, Homo sapiens
ccggaactgcgagctctc

SEQ ID NO: 10144 - DNA, 18 bp, Homo sapiens
ccggaagaagaggtaggg

SEQ ID NO: 10145 - DNA, 18 bp, Homo sapiens
ccggaagacggaagtgca

SEQ ID NO: 10146 - DNA, 24 bp, Homo sapiens
ccggaagagacgagtgcggtaaca

SEQ ID NO: 10147 - DNA, 17 bp, Homo sapiens
ccggaagcactgtccct

SEQ ID NO: 10148 - DNA, 18 bp, Homo sapiens
ccggaagccgcaggtggg

SEQ ID NO: 10149 - DNA, 16 bp, Homo sapiens
ccggaagccgccgaaa

SEQ ID NO: 10150 - DNA, 17 bp, Homo sapiens
ccggaagcggagagcgg

SEQ ID NO: 10151 - DNA, 18 bp, Homo sapiens
ccggaagcggagagcggc

SEQ ID NO: 10152 - DNA, 21 bp, Homo sapiens
ccggaagcggagagcggctga

SEQ ID NO: 10153 - DNA, 22 bp, Homo sapiens
ccggaagcggagagcggctgat

SEQ ID NO: 10154 - DNA, 18 bp, Homo sapiens
ccggaagcgggggtgcag

SEQ ID NO: 10155 - DNA, 18 bp, Homo sapiens
ccggaaggagctagacgg

SEQ ID NO: 10156 - DNA, 18 bp, Homo sapiens
ccggaagtgaaggggcca

SEQ ID NO: 10157 - DNA, 19 bp, Homo sapiens
ccggaagtgaggcaccctc

SEQ ID NO: 10158 - DNA, 20 bp, Homo sapiens
ccggaagtgccgaatgggga

SEQ ID NO: 10159 - DNA, 21 bp, Homo sapiens
ccggaagtgtggcttcgttta

SEQ ID NO: 10160 - DNA, 18 bp, Homo sapiens
ccggaatggcagcaagct

SEQ ID NO: 10161 - DNA, 16 bp, Homo sapiens
ccggacaagggcaacg

SEQ ID NO: 10162 - DNA, 18 bp, Homo sapiens
ccggacaagggcaacgag

SEQ ID NO: 10163 - DNA, 18 bp, Homo sapiens
ccggacaccaacgacggg

SEQ ID NO: 10164 - DNA, 16 bp, Homo sapiens
ccggacaccaggcata

SEQ ID NO: 10165 - DNA, 16 bp, Homo sapiens
ccggacacccgatccc

SEQ ID NO: 10166 - DNA, 19 bp, Homo sapiens
ccggaccagccgctgcggg

SEQ ID NO: 10167 - DNA, 18 bp, Homo sapiens
ccggacccgcaaccacca

SEQ ID NO: 10168 - DNA, 18 bp, Homo sapiens
ccggaccgcgcgatggag

SEQ ID NO: 10169 - DNA, 19 bp, Homo sapiens
ccggaccgcgcgatggagt

SEQ ID NO: 10170 - DNA, 20 bp, Homo sapiens
ccggacgaaagacacgggcc

SEQ ID NO: 10171 - DNA, 19 bp, Homo sapiens
ccggacgagcagcggaggc

SEQ ID NO: 10172 - DNA, 20 bp, Homo sapiens
ccggacgcagtgaggggggt

SEQ ID NO: 10173 - DNA, 18 bp, Homo sapiens
ccggacggaggtagaggc

SEQ ID NO: 10174 - DNA, 17 bp, Homo sapiens
ccggacgggtatataga

SEQ ID NO: 10175 - DNA, 20 bp, Homo sapiens
ccggactcccgggtcctctg

SEQ ID NO: 10176 - DNA, 18 bp, Homo sapiens
ccggactccggcagggaa

SEQ ID NO: 10177 - DNA, 18 bp, Homo sapiens
ccggactcggaaatgggg

SEQ ID NO: 10178 - DNA, 17 bp, Homo sapiens
ccggactgtcgcggccc

SEQ ID NO: 10179 - DNA, 18 bp, Homo sapiens
ccggactgtcgcggcccg

SEQ ID NO: 10180 - DNA, 18 bp, Homo sapiens
ccggagaagctgtgaggt

SEQ ID NO: 10181 - DNA, 17 bp, Homo sapiens
ccggagacaggtaaccg

SEQ ID NO: 10182 - DNA, 20 bp, Homo sapiens
ccggagacaggtaaccgtgc

SEQ ID NO: 10183 - DNA, 17 bp, Homo sapiens
ccggagaccgctgggga

SEQ ID NO: 10184 - DNA, 19 bp, Homo sapiens
ccggagacgtaggagtggg

SEQ ID NO: 10185 - DNA, 21 bp, Homo sapiens
ccggagagaaaaagcggagtc

SEQ ID NO: 10186 - DNA, 19 bp, Homo sapiens
ccggagagatggcggagtt

SEQ ID NO: 10187 - DNA, 20 bp, Homo sapiens
ccggagaggtgagtcggctg

SEQ ID NO: 10188 - DNA, 18 bp, Homo sapiens
ccggagcaagcggagctc

SEQ ID NO: 10189 - DNA, 21 bp, Homo sapiens
ccggagcagccggaagctagc

SEQ ID NO: 10190 - DNA, 19 bp, Homo sapiens
ccggagcgctggtgccggc

SEQ ID NO: 10191 - DNA, 17 bp, Homo sapiens
ccggagcgggaagatgg

SEQ ID NO: 10192 - DNA, 18 bp, Homo sapiens
ccggagctctctggatgg

SEQ ID NO: 10193 - DNA, 18 bp, Homo sapiens
ccggagctggcaggcggg

SEQ ID NO: 10194 - DNA, 19 bp, Homo sapiens
ccggaggaggagtaggtgc

SEQ ID NO: 10195 - DNA, 16 bp, Homo sapiens
ccggaggcggaaccgg

SEQ ID NO: 10196 - DNA, 18 bp, Homo sapiens
ccggaggcggaggttctg

SEQ ID NO: 10197 - DNA, 18 bp, Homo sapiens
ccggagggaagcaaagga

SEQ ID NO: 10198 - DNA, 18 bp, Homo sapiens
ggtccggggcgggaggag

SEQ ID NO: 10199 - DNA, 18 bp, Homo sapiens
ggtccggtcgcgtccgac

SEQ ID NO: 10200 - DNA, 20 bp, Homo sapiens
ggtcctcagcgtcttggcgg

SEQ ID NO: 10201 - DNA, 17 bp, Homo sapiens
ggtcctgtgaaggcgag

SEQ ID NO: 10202 - DNA, 17 bp, Homo sapiens
ggtcctgtgagggcgag

SEQ ID NO: 10203 - DNA, 18 bp, Homo sapiens
ggtcgactagccaagtga

SEQ ID NO: 10204 - DNA, 18 bp, Homo sapiens
ggtcgcaagatggcggcg

SEQ ID NO: 10205 - DNA, 23 bp, Homo sapiens
ggtcgcaagatggcggcgctgaa

SEQ ID NO: 10206 - DNA, 16 bp, Homo sapiens
ggtcgccggctgctta

SEQ ID NO: 10207 - DNA, 19 bp, Homo sapiens
ggtcgcctccagaggtgcg

SEQ ID NO: 10208 - DNA, 18 bp, Homo sapiens
ggtcgcgcgagagccgca

SEQ ID NO: 10209 - DNA, 17 bp, Homo sapiens
ggtcggagcggaaggac

SEQ ID NO: 10210 - DNA, 18 bp, Homo sapiens
ggtcggctggttatcggg

SEQ ID NO: 10211 - DNA, 18 bp, Homo sapiens
ggtcggggtcccagcgcc

SEQ ID NO: 10212 - DNA, 17 bp, Homo sapiens
ggtcggtagtcgtcgcc

SEQ ID NO: 10213 - DNA, 16 bp, Homo sapiens
ggtctatggctgcgac

SEQ ID NO: 10214 - DNA, 22 bp, Homo sapiens
ggtctcagtacccctgcagccg

SEQ ID NO: 10215 - DNA, 18 bp, Homo sapiens
ggtctccgtttgtttgaa

SEQ ID NO: 10216 - DNA, 20 bp, Homo sapiens
ggtctcgccggcagccccag

SEQ ID NO: 10217 - DNA, 18 bp, Homo sapiens
ggtctcggaagtacgagg

SEQ ID NO: 10218 - DNA, 18 bp, Homo sapiens
ggtctctagcagctgccg

SEQ ID NO: 10219 - DNA, 21 bp, Homo sapiens
ggtctgcagggttgacctgcg

SEQ ID NO: 10220 - DNA, 16 bp, Homo sapiens
ggtctgcggcttaggg

SEQ ID NO: 10221 - DNA, 19 bp, Homo sapiens
ggtctgggaggcagttctg

SEQ ID NO: 10222 - DNA, 18 bp, Homo sapiens
ggtctgggtgcccggagg

SEQ ID NO: 10223 - DNA, 17 bp, Homo sapiens
ggtcttacccaacagat

SEQ ID NO: 10224 - DNA, 21 bp, Homo sapiens
ggtctttcgtggtcagtaaat

SEQ ID NO: 10225 - DNA, 20 bp, Homo sapiens
ggtgaaagtggatggcagcg

SEQ ID NO: 10226 - DNA, 17 bp, Homo sapiens
ggtgaagacgggcggag

SEQ ID NO: 10227 - DNA, 19 bp, Homo sapiens
ggtgaattctagaggcggc

SEQ ID NO: 10228 - DNA, 17 bp, Homo sapiens
ggtgacaggtaggcggc

SEQ ID NO: 10229 - DNA, 19 bp, Homo sapiens
ggtgaccctcggctgctgc

SEQ ID NO: 10230 - DNA, 17 bp, Homo sapiens
ggtgacgtggacacgga

SEQ ID NO: 10231 - DNA, 18 bp, Homo sapiens
ggtgactcgggtcgaggc

SEQ ID NO: 10232 - DNA, 23 bp, Homo sapiens
ggtgactgagcggagcccggtga

SEQ ID NO: 10233 - DNA, 17 bp, Homo sapiens
ggtgagaaggagaagga

SEQ ID NO: 10234 - DNA, 18 bp, Homo sapiens
ggtgagaaggccgtagaa

SEQ ID NO: 10235 - DNA, 21 bp, Homo sapiens
ggtgagacgagtggaagagct

SEQ ID NO: 10236 - DNA, 20 bp, Homo sapiens
ggtgagaggcggaggagcgg

SEQ ID NO: 10237 - DNA, 16 bp, Homo sapiens
ggtgagattctctccc

SEQ ID NO: 10238 - DNA, 18 bp, Homo sapiens
ggtgagcgcgcggcggaa

SEQ ID NO: 10239 - DNA, 22 bp, Homo sapiens
ggtgaggagagctgaggccgcg

SEQ ID NO: 10240 - DNA, 22 bp, Homo sapiens
ggtgaggcaaggtgtttccagc

SEQ ID NO: 10241 - DNA, 18 bp, Homo sapiens
ggtgaggtttgttaccgc

SEQ ID NO: 10242 - DNA, 15 bp, Homo sapiens
ggtgagtatcccgcg

SEQ ID NO: 10243 - DNA, 16 bp, Homo sapiens
ggtgagtgaggacgca

SEQ ID NO: 10244 - DNA, 20 bp, Homo sapiens
ggtgagtgaggacgggacgc

SEQ ID NO: 10245 - DNA, 16 bp, Homo sapiens
ggtgatggcgggcaag

SEQ ID NO: 10246 - DNA, 18 bp, Homo sapiens
ggtgcagcctgatgcgca

SEQ ID NO: 10247 - DNA, 20 bp, Homo sapiens
ggtgcagcgggacagggcga

SEQ ID NO: 10248 - DNA, 15 bp, Homo sapiens
ggtgccagcggcgga

SEQ ID NO: 10249 - DNA, 22 bp, Homo sapiens
ggtgccaggccaggtgtgtgcg

SEQ ID NO: 10250 - DNA, 23 bp, Homo sapiens
ggtgccaggcccgggtggcgccg

SEQ ID NO: 10251 - DNA, 17 bp, Homo sapiens
ggtgccgagagaagcag

SEQ ID NO: 10252 - DNA, 17 bp, Homo sapiens
ggtgccggggcgcagcg

SEQ ID NO: 10253 - DNA, 18 bp, Homo sapiens
ggtgcgagcgtggacctg

SEQ ID NO: 10254 - DNA, 22 bp, Homo sapiens
ggtgcgcagcattcggcagagg

SEQ ID NO: 10255 - DNA, 16 bp, Homo sapiens
ccggaggtgaggcgga

SEQ ID NO: 10256 - DNA, 17 bp, Homo sapiens
ccggaggtgaggcggaa

SEQ ID NO: 10257 - DNA, 19 bp, Homo sapiens
ccggagtgaggcgaggccg

SEQ ID NO: 10258 - DNA, 16 bp, Homo sapiens
ccggagtggcccggcc

SEQ ID NO: 10259 - DNA, 17 bp, Homo sapiens
ccggagtggggtgtcgg

SEQ ID NO: 10260 - DNA, 18 bp, Homo sapiens
ccggatagagagacacgg

SEQ ID NO: 10261 - DNA, 20 bp, Homo sapiens
ccggatataggtaagtgtga

SEQ ID NO: 10262 - DNA, 18 bp, Homo sapiens
ccggatccgggagagggg

SEQ ID NO: 10263 - DNA, 18 bp, Homo sapiens
ccggatcggcaacagtgc

SEQ ID NO: 10264 - DNA, 24 bp, Homo sapiens
ccggatcgtgcgtgaggcggcttc

SEQ ID NO: 10265 - DNA, 20 bp, Homo sapiens
ccggatggcgtaggatcggc

SEQ ID NO: 10266 - DNA, 17 bp, Homo sapiens
ccggattggcgctgagg

SEQ ID NO: 10267 - DNA, 22 bp, Homo sapiens
ccggattttgcggggttcgtcg

SEQ ID NO: 10268 - DNA, 20 bp, Homo sapiens
ccggcaacaaagagctgcgg

SEQ ID NO: 10269 - DNA, 23 bp, Homo sapiens
ccggcaacgggggcggacacgac

SEQ ID NO: 10270 - DNA, 18 bp, Homo sapiens
ccggcaagatggtgagtg

SEQ ID NO: 10271 - DNA, 18 bp, Homo sapiens
ccggcacctcattcattt

SEQ ID NO: 10272 - DNA, 18 bp, Homo sapiens
ccggcactaggaacagcc

SEQ ID NO: 10273 - DNA, 18 bp, Homo sapiens
ccggcactcgctcagcga

SEQ ID NO: 10274 - DNA, 17 bp, Homo sapiens
ccggcagaggctgaaca

SEQ ID NO: 10275 - DNA, 17 bp, Homo sapiens
ccggcagcccggacgca

SEQ ID NO: 10276 - DNA, 18 bp, Homo sapiens
ccggcagccttgctcagt

SEQ ID NO: 10277 - DNA, 21 bp, Homo sapiens
ccggcagctggacttggaaaa

SEQ ID NO: 10278 - DNA, 18 bp, Homo sapiens
ccggcagtcgggaactag

SEQ ID NO: 10279 - DNA, 16 bp, Homo sapiens
ccggccagcgcagcca

SEQ ID NO: 10280 - DNA, 20 bp, Homo sapiens
ccggccatggggtgctgcta

SEQ ID NO: 10281 - DNA, 20 bp, Homo sapiens
ccggcccggccagcgcgcat

SEQ ID NO: 10282 - DNA, 18 bp, Homo sapiens
ccggcccggtacttgtga

SEQ ID NO: 10283 - DNA, 18 bp, Homo sapiens
ccggccctccccagccgc

SEQ ID NO: 10284 - DNA, 17 bp, Homo sapiens
ccggccgccggcaccga

SEQ ID NO: 10285 - DNA, 19 bp, Homo sapiens
ccggccgcggccgccgctg

SEQ ID NO: 10286 - DNA, 21 bp, Homo sapiens
ccggccggccctgggggctga

SEQ ID NO: 10287 - DNA, 22 bp, Homo sapiens
ccggcctgcgcgcggagccggc

SEQ ID NO: 10288 - DNA, 19 bp, Homo sapiens
ccggcctgggcgcagcgac

SEQ ID NO: 10289 - DNA, 19 bp, Homo sapiens
ccggccttggaacaactgt

SEQ ID NO: 10290 - DNA, 23 bp, Homo sapiens
ccggcgaaggagggcgaggagga

SEQ ID NO: 10291 - DNA, 17 bp, Homo sapiens
ccggcgacaagatggca

SEQ ID NO: 10292 - DNA, 20 bp, Homo sapiens
ccggcgcagtgttgggactg

SEQ ID NO: 10293 - DNA, 21 bp, Homo sapiens
ccggcgccgctttctggaagg

SEQ ID NO: 10294 - DNA, 18 bp, Homo sapiens
ccggcgctgacgtgtctg

SEQ ID NO: 10295 - DNA, 18 bp, Homo sapiens
ccggcgctgcagagggag

SEQ ID NO: 10296 - DNA, 18 bp, Homo sapiens
ccggcgctgttgaatggc

SEQ ID NO: 10297 - DNA, 22 bp, Homo sapiens
ccggcggacagtgagggcgcgg

SEQ ID NO: 10298 - DNA, 18 bp, Homo sapiens
ccggcggacggcgaagtg

SEQ ID NO: 10299 - DNA, 21 bp, Homo sapiens
ccggcggaggagacagtggtg

SEQ ID NO: 10300 - DNA, 14 bp, Homo sapiens
ccggcggagtcgcc

SEQ ID NO: 10301 - DNA, 18 bp, Homo sapiens
ccggcggcagagaggata

SEQ ID NO: 10302 - DNA, 21 bp, Homo sapiens
ccggcggggctgggcctcgca

SEQ ID NO: 10303 - DNA, 23 bp, Homo sapiens
ccggcgtagggacacttcggtcc

SEQ ID NO: 10304 - DNA, 17 bp, Homo sapiens
ccggcgtatgaggcggt

SEQ ID NO: 10305 - DNA, 18 bp, Homo sapiens
ccggcgtgcctacgcctc

SEQ ID NO: 10306 - DNA, 18 bp, Homo sapiens
ccggcgtgctactgagtt

SEQ ID NO: 10307 - DNA, 18 bp, Homo sapiens
ccggcgtgctcctccctc

SEQ ID NO: 10308 - DNA, 17 bp, Homo sapiens
ccggctcaactggggag

SEQ ID NO: 10309 - DNA, 18 bp, Homo sapiens
ccggctcccaggatgcag

SEQ ID NO: 10310 - DNA, 21 bp, Homo sapiens
ccggctctagcctcccgctgt

SEQ ID NO: 10311 - DNA, 23 bp, Homo sapiens
ccggctgacagtcctggccctgc

SEQ ID NO: 10312 - DNA, 18 bp, Homo sapiens
ggtgcggacaggaagagg

SEQ ID NO: 10313 - DNA, 18 bp, Homo sapiens
ggtgcggctgtgggtgag

SEQ ID NO: 10314 - DNA, 22 bp, Homo sapiens
ggtgcggggggcagctgagagc

SEQ ID NO: 10315 - DNA, 16 bp, Homo sapiens
ggtgctagacgtttcg

SEQ ID NO: 10316 - DNA, 20 bp, Homo sapiens
ggtgctcagagtgtggtcag

SEQ ID NO: 10317 - DNA, 18 bp, Homo sapiens
ggtgctgatgcgagtcgg

SEQ ID NO: 10318 - DNA, 17 bp, Homo sapiens
ggtgctgccgttgcccg

SEQ ID NO: 10319 - DNA, 18 bp, Homo sapiens
ggtgctggcagcgacatg

SEQ ID NO: 10320 - DNA, 23 bp, Homo sapiens
ggtgctggggcttcttctcctga

SEQ ID NO: 10321 - DNA, 23 bp, Homo sapiens
ggtgcttctctctttcgctcagg

SEQ ID NO: 10322 - DNA, 18 bp, Homo sapiens
ggtggacatggctgcttc

SEQ ID NO: 10323 - DNA, 16 bp, Homo sapiens
ggtggacgcaccgggt

SEQ ID NO: 10324 - DNA, 19 bp, Homo sapiens
ggtggaggaaatgcggagc

SEQ ID NO: 10325 - DNA, 20 bp, Homo sapiens
ggtggataaaggaggggacc

SEQ ID NO: 10326 - DNA, 20 bp, Homo sapiens
ggtggcagccgcgccgaacc

SEQ ID NO: 10327 - DNA, 19 bp, Homo sapiens
ggtggcagtcgcaacccat

SEQ ID NO: 10328 - DNA, 18 bp, Homo sapiens
ggtggcctcggtcggtac

SEQ ID NO: 10329 - DNA, 20 bp, Homo sapiens
ggtggcgaaggggaggcgcc

SEQ ID NO: 10330 - DNA, 18 bp, Homo sapiens
ggtggcgagcctgaggcg

SEQ ID NO: 10331 - DNA, 18 bp, Homo sapiens
ggtggcgctgggctcggg

SEQ ID NO: 10332 - DNA, 17 bp, Homo sapiens
ggtggcggcagcggcgg

SEQ ID NO: 10333 - DNA, 18 bp, Homo sapiens
ggtggcggcgaccggaag

SEQ ID NO: 10334 - DNA, 24 bp, Homo sapiens
ggtggcgggggcggagcgcgccgc

SEQ ID NO: 10335 - DNA, 18 bp, Homo sapiens
ggtggcggttgagacagc

SEQ ID NO: 10336 - DNA, 17 bp, Homo sapiens
ggtggcgtcgtaacgcc

SEQ ID NO: 10337 - DNA, 16 bp, Homo sapiens
ggtggctcgaggtggt

SEQ ID NO: 10338 - DNA, 17 bp, Homo sapiens
ggtgggactcagaaggc

SEQ ID NO: 10339 - DNA, 19 bp, Homo sapiens
ggtgggagaaagtcgcgtc

SEQ ID NO: 10340 - DNA, 19 bp, Homo sapiens
ggtggggcggcggcgccag

SEQ ID NO: 10341 - DNA, 18 bp, Homo sapiens
ggtgggtcggtagtagcg

SEQ ID NO: 10342 - DNA, 18 bp, Homo sapiens
ggtgggtgagactcagtg

SEQ ID NO: 10343 - DNA, 17 bp, Homo sapiens
ggtgggttggttgggcg

SEQ ID NO: 10344 - DNA, 16 bp, Homo sapiens
ggtggtaagatggcgg

SEQ ID NO: 10345 - DNA, 21 bp, Homo sapiens
ggtggtgagagtcgcacgcgc

SEQ ID NO: 10346 - DNA, 18 bp, Homo sapiens
ggtggtgcacgggaaacg

SEQ ID NO: 10347 - DNA, 18 bp, Homo sapiens
ggtggtgcggagggaggc

SEQ ID NO: 10348 - DNA, 18 bp, Homo sapiens
ggtggtggagcaagatgg

SEQ ID NO: 10349 - DNA, 23 bp, Homo sapiens
ggtggtgttggcgctgaggaccc

SEQ ID NO: 10350 - DNA, 18 bp, Homo sapiens
ggtgtaacgttcgggctc

SEQ ID NO: 10351 - DNA, 20 bp, Homo sapiens
ggtgtctccggccataatga

SEQ ID NO: 10352 - DNA, 17 bp, Homo sapiens
ggtgtctgtgctcgtcg

SEQ ID NO: 10353 - DNA, 18 bp, Homo sapiens
ggtgtcttgaaactgacg

SEQ ID NO: 10354 - DNA, 17 bp, Homo sapiens
ggtgtgagctgcgccga

SEQ ID NO: 10355 - DNA, 18 bp, Homo sapiens
ggtgtgttgtcatccgcg

SEQ ID NO: 10356 - DNA, 18 bp, Homo sapiens
ggtgttgtcatccgcggc

SEQ ID NO: 10357 - DNA, 18 bp, Homo sapiens
ggtgtttataagctgccc

SEQ ID NO: 10358 - DNA, 16 bp, Homo sapiens
ggtgtttcgctgggcc

SEQ ID NO: 10359 - DNA, 21 bp, Homo sapiens
ggttagcaggtgagcctgcga

SEQ ID NO: 10360 - DNA, 16 bp, Homo sapiens
ggttagctgagtttcg

SEQ ID NO: 10361 - DNA, 16 bp, Homo sapiens
ggttaggaagcggatc

SEQ ID NO: 10362 - DNA, 15 bp, Homo sapiens
ggttaggattctgcg

SEQ ID NO: 10363 - DNA, 17 bp, Homo sapiens
ggttcaatggcgtggca

SEQ ID NO: 10364 - DNA, 18 bp, Homo sapiens
ggttcatagccggagtag

SEQ ID NO: 10365 - DNA, 19 bp, Homo sapiens
ggttccaacacctacaaca

SEQ ID NO: 10366 - DNA, 18 bp, Homo sapiens
ggttcccagactgaattg

SEQ ID NO: 10367 - DNA, 15 bp, Homo sapiens
ggttcccgggccgac

SEQ ID NO: 10368 - DNA, 18 bp, Homo sapiens
ggttccgatcacagactg

SEQ ID NO: 10369 - DNA, 18 bp, Homo sapiens
ccggctgacgttggacga

SEQ ID NO: 10370 - DNA, 19 bp, Homo sapiens
ccggctgcaggcggatgga

SEQ ID NO: 10371 - DNA, 18 bp, Homo sapiens
ccggctgccagaccatgc

SEQ ID NO: 10372 - DNA, 18 bp, Homo sapiens
ccggctgccgcaggcgct

SEQ ID NO: 10373 - DNA, 18 bp, Homo sapiens
ccggctgctgaaccggtg

SEQ ID NO: 10374 - DNA, 22 bp, Homo sapiens
ccggctgctgctgctgctgctg

SEQ ID NO: 10375 - DNA, 18 bp, Homo sapiens
ccggctggaccaggagac

SEQ ID NO: 10376 - DNA, 18 bp, Homo sapiens
ccggctgggagtaggcgg

SEQ ID NO: 10377 - DNA, 21 bp, Homo sapiens
ccggctgggagtaggcggcag

SEQ ID NO: 10378 - DNA, 18 bp, Homo sapiens
ccggctggggttgccggc

SEQ ID NO: 10379 - DNA, 18 bp, Homo sapiens
ccggctggtgggtgggtg

SEQ ID NO: 10380 - DNA, 17 bp, Homo sapiens
ccggctgtgaggaagga

SEQ ID NO: 10381 - DNA, 18 bp, Homo sapiens
ccggcttgcagagaggtg

SEQ ID NO: 10382 - DNA, 16 bp, Homo sapiens
ccggcttggctagcgc

SEQ ID NO: 10383 - DNA, 22 bp, Homo sapiens
ccggcttggtcctgcggtccct

SEQ ID NO: 10384 - DNA, 18 bp, Homo sapiens
ccgggaaagaccgataaa

SEQ ID NO: 10385 - DNA, 18 bp, Homo sapiens
ccgggaaggggcagaagc

SEQ ID NO: 10386 - DNA, 17 bp, Homo sapiens
ccgggaagtggaccggc

SEQ ID NO: 10387 - DNA, 18 bp, Homo sapiens
ccgggaccgggtagccgc

SEQ ID NO: 10388 - DNA, 21 bp, Homo sapiens
ccgggacgattctgggcagtg

SEQ ID NO: 10389 - DNA, 17 bp, Homo sapiens
ccgggacggtaagcgat

SEQ ID NO: 10390 - DNA, 18 bp, Homo sapiens
ccgggagcggacttacct

SEQ ID NO: 10391 - DNA, 18 bp, Homo sapiens
ccgggagctgggaacccg

SEQ ID NO: 10392 - DNA, 19 bp, Homo sapiens
ccgggagggggcgcggggc

SEQ ID NO: 10393 - DNA, 18 bp, Homo sapiens
ccgggagggtaggatggc

SEQ ID NO: 10394 - DNA, 21 bp, Homo sapiens
ccgggagggtaggatggcgtc

SEQ ID NO: 10395 - DNA, 18 bp, Homo sapiens
ccgggaggtactaccagg

SEQ ID NO: 10396 - DNA, 21 bp, Homo sapiens
ccgggagtccgagacccgggt

SEQ ID NO: 10397 - DNA, 19 bp, Homo sapiens
ccgggagtcggcgggcggc

SEQ ID NO: 10398 - DNA, 20 bp, Homo sapiens
ccgggagtgggaagtggagg

SEQ ID NO: 10399 - DNA, 18 bp, Homo sapiens
ccgggcagccgaagagtg

SEQ ID NO: 10400 - DNA, 18 bp, Homo sapiens
ccgggccaggcaagatgg

SEQ ID NO: 10401 - DNA, 18 bp, Homo sapiens
ccgggccagggtcgcggc

SEQ ID NO: 10402 - DNA, 17 bp, Homo sapiens
ccgggcccaggaagggc

SEQ ID NO: 10403 - DNA, 17 bp, Homo sapiens
ccgggcccctccggaaa

SEQ ID NO: 10404 - DNA, 18 bp, Homo sapiens
ccgggccgtaccgagcta

SEQ ID NO: 10405 - DNA, 20 bp, Homo sapiens
ccgggccgtgctgcttatgg

SEQ ID NO: 10406 - DNA, 18 bp, Homo sapiens
ccgggcgacgagtgcggg

SEQ ID NO: 10407 - DNA, 18 bp, Homo sapiens
ccgggcgccgccatggag

SEQ ID NO: 10408 - DNA, 23 bp, Homo sapiens
ccgggcgcgcgtcgagcctccgc

SEQ ID NO: 10409 - DNA, 17 bp, Homo sapiens
ccgggcgctagcccacc

SEQ ID NO: 10410 - DNA, 19 bp, Homo sapiens
ccgggcgtagagggggccg

SEQ ID NO: 10411 - DNA, 17 bp, Homo sapiens
ccgggctcccgaggtga

SEQ ID NO: 10412 - DNA, 22 bp, Homo sapiens
ccgggctcccgggttccgcttc

SEQ ID NO: 10413 - DNA, 18 bp, Homo sapiens
ccgggctccctgcaggcg

SEQ ID NO: 10414 - DNA, 18 bp, Homo sapiens
ccgggctgcgagccgggc

SEQ ID NO: 10415 - DNA, 18 bp, Homo sapiens
ccgggctggtgatggggt

SEQ ID NO: 10416 - DNA, 20 bp, Homo sapiens
ccgggctgtggtccccgcgc

SEQ ID NO: 10417 - DNA, 21 bp, Homo sapiens
ccggggacggagagacggagt

SEQ ID NO: 10418 - DNA, 23 bp, Homo sapiens
ccggggagaggcaccatgagcgg

SEQ ID NO: 10419 - DNA, 23 bp, Homo sapiens
ccggggcgcctgcgctgccgccg

SEQ ID NO: 10420 - DNA, 17 bp, Homo sapiens
ccggggcggacgggcgc

SEQ ID NO: 10421 - DNA, 23 bp, Homo sapiens
ccggggctgggctggcctgactg

SEQ ID NO: 10422 - DNA, 17 bp, Homo sapiens
ccgggggccgggaccag

SEQ ID NO: 10423 - DNA, 18 bp, Homo sapiens
ccgggggcgggcgggcgg

SEQ ID NO: 10424 - DNA, 19 bp, Homo sapiens
ccgggggcttctgggaaaa

SEQ ID NO: 10425 - DNA, 18 bp, Homo sapiens
ccgggggtcagccggcgt

SEQ ID NO: 10426 - DNA, 21 bp, Homo sapiens
ggttccggctggggaagatgg

SEQ ID NO: 10427 - DNA, 17 bp, Homo sapiens
ggttccggggacagtta

SEQ ID NO: 10428 - DNA, 19 bp, Homo sapiens
ggttccggggacagttagg

SEQ ID NO: 10429 - DNA, 20 bp, Homo sapiens
ggttccggtagcagctagtc

SEQ ID NO: 10430 - DNA, 17 bp, Homo sapiens
ggttccgtgcaactttc

SEQ ID NO: 10431 - DNA, 16 bp, Homo sapiens
ggttccgttaggtctg

SEQ ID NO: 10432 - DNA, 20 bp, Homo sapiens
ggttccgttaggtctgaggg

SEQ ID NO: 10433 - DNA, 18 bp, Homo sapiens
ggttctccgcccctgcca

SEQ ID NO: 10434 - DNA, 21 bp, Homo sapiens
ggttctgagcgttgtctgtgt

SEQ ID NO: 10435 - DNA, 18 bp, Homo sapiens
ggttctgggacaggtgac

SEQ ID NO: 10436 - DNA, 16 bp, Homo sapiens
ggttcttcactcgcga

SEQ ID NO: 10437 - DNA, 20 bp, Homo sapiens
ggttcttgttacaactgagt

SEQ ID NO: 10438 - DNA, 18 bp, Homo sapiens
ggttgatggccccgactg

SEQ ID NO: 10439 - DNA, 24 bp, Homo sapiens
ggttgattcctcggctgaccccac

SEQ ID NO: 10440 - DNA, 19 bp, Homo sapiens
ggttgcaccatcccagaag

SEQ ID NO: 10441 - DNA, 21 bp, Homo sapiens
ggttgcaccatcccagaagct

SEQ ID NO: 10442 - DNA, 18 bp, Homo sapiens
ggttgccggctgaaataa

SEQ ID NO: 10443 - DNA, 18 bp, Homo sapiens
ggttgccgttgtcttttt

SEQ ID NO: 10444 - DNA, 18 bp, Homo sapiens
ggttgcggcgccgcgcgg

SEQ ID NO: 10445 - DNA, 16 bp, Homo sapiens
ggttgcgggcctttgt

SEQ ID NO: 10446 - DNA, 18 bp, Homo sapiens
ggttgcggttagtggacc

SEQ ID NO: 10447 - DNA, 22 bp, Homo sapiens
ggttgctcgtagtgagttgcgc

SEQ ID NO: 10448 - DNA, 15 bp, Homo sapiens
ggttgctgccgccgc

SEQ ID NO: 10449 - DNA, 17 bp, Homo sapiens
ggttggcgagttcaccc

SEQ ID NO: 10450 - DNA, 18 bp, Homo sapiens
ggttgtattcgctggata

SEQ ID NO: 10451 - DNA, 19 bp, Homo sapiens
ggttgtgcttccggtgcgg

SEQ ID NO: 10452 - DNA, 18 bp, Homo sapiens
ggttgtggttggtgtgcg

SEQ ID NO: 10453 - DNA, 19 bp, Homo sapiens
ggttgtgttggggaactga

SEQ ID NO: 10454 - DNA, 22 bp, Homo sapiens
ggtttcagacttcagaaggaca

SEQ ID NO: 10455 - DNA, 18 bp, Homo sapiens
ggtttcagggcaaagcgg

SEQ ID NO: 10456 - DNA, 16 bp, Homo sapiens
ggtttcggagcactac

SEQ ID NO: 10457 - DNA, 17 bp, Homo sapiens
ggtttcggttggaggac

SEQ ID NO: 10458 - DNA, 23 bp, Homo sapiens
ggtttctgaggttcttcactcgc

SEQ ID NO: 10459 - DNA, 20 bp, Homo sapiens
ggtttcttttctcgccatgt

SEQ ID NO: 10460 - DNA, 20 bp, Homo sapiens
ggtttggtaagtaggaaagt

SEQ ID NO: 10461 - DNA, 16 bp, Homo sapiens
ggttttcctcgcgttc

SEQ ID NO: 10462 - DNA, 18 bp, Homo sapiens
ggttttcctcgcgttctt

SEQ ID NO: 10463 - DNA, 20 bp, Homo sapiens
ggttttgctccgcccggccg

SEQ ID NO: 10464 - DNA, 18 bp, Homo sapiens
gtaaaaggccgcggcagg

SEQ ID NO: 10465 - DNA, 18 bp, Homo sapiens
gtaaaagtggccgtagcc

SEQ ID NO: 10466 - DNA, 20 bp, Homo sapiens
gtaaacagacatggccggcg

SEQ ID NO: 10467 - DNA, 20 bp, Homo sapiens
gtaaacggaccctgcagacc

SEQ ID NO: 10468 - DNA, 19 bp, Homo sapiens
gtaaagaagaaggcggcca

SEQ ID NO: 10469 - DNA, 16 bp, Homo sapiens
gtaaagatggcggagc

SEQ ID NO: 10470 - DNA, 19 bp, Homo sapiens
gtaaaggaagtgagccggc

SEQ ID NO: 10471 - DNA, 17 bp, Homo sapiens
gtaaataatctcggaaa

SEQ ID NO: 10472 - DNA, 18 bp, Homo sapiens
gtaacaagatggcgtcgt

SEQ ID NO: 10473 - DNA, 18 bp, Homo sapiens
gtaacagtttgcaaaccg

SEQ ID NO: 10474 - DNA, 19 bp, Homo sapiens
gtaacagtttgcaaaccga

SEQ ID NO: 10475 - DNA, 18 bp, Homo sapiens
gtaacccggagggagaga

SEQ ID NO: 10476 - DNA, 15 bp, Homo sapiens
gtaaccgtcgtctgt

SEQ ID NO: 10477 - DNA, 18 bp, Homo sapiens
gtaacgagcggcggcggc

SEQ ID NO: 10478 - DNA, 17 bp, Homo sapiens
gtaacgcgggaaaagcc

SEQ ID NO: 10479 - DNA, 17 bp, Homo sapiens
gtaacgttcgggctccg

SEQ ID NO: 10480 - DNA, 17 bp, Homo sapiens
gtaagaatggccttgga

SEQ ID NO: 10481 - DNA, 16 bp, Homo sapiens
gtaaggagactggggg

SEQ ID NO: 10482 - DNA, 19 bp, Homo sapiens
gtaaggcagcgacggcggc

SEQ ID NO: 10483 - DNA, 17 bp, Homo sapiens
ccggggtcacgataacg

SEQ ID NO: 10484 - DNA, 17 bp, Homo sapiens
ccggggtcctggcccgc

SEQ ID NO: 10485 - DNA, 17 bp, Homo sapiens
ccggggttagcaggtga

SEQ ID NO: 10486 - DNA, 19 bp, Homo sapiens
ccggggttgacgatggctg

SEQ ID NO: 10487 - DNA, 20 bp, Homo sapiens
ccgggtcgctgccgcctccg

SEQ ID NO: 10488 - DNA, 18 bp, Homo sapiens
ccgggtcggacggcgcta

SEQ ID NO: 10489 - DNA, 18 bp, Homo sapiens
ccgggtcgtggcagccgg

SEQ ID NO: 10490 - DNA, 22 bp, Homo sapiens
ccgggtctctcgcgcgagcgat

SEQ ID NO: 10491 - DNA, 17 bp, Homo sapiens
ccgggtgaacggagctt

SEQ ID NO: 10492 - DNA, 22 bp, Homo sapiens
ccgggtgagtgagagagttggt

SEQ ID NO: 10493 - DNA, 22 bp, Homo sapiens
ccgggtgcggacggcggaggcg

SEQ ID NO: 10494 - DNA, 18 bp, Homo sapiens
ccgggtgtctggaggctg

SEQ ID NO: 10495 - DNA, 18 bp, Homo sapiens
ccgggttcggagccgttc

SEQ ID NO: 10496 - DNA, 20 bp, Homo sapiens
ccgggttggcaaaaggggcg

SEQ ID NO: 10497 - DNA, 17 bp, Homo sapiens
ccgggtttgcgggaccg

SEQ ID NO: 10498 - DNA, 19 bp, Homo sapiens
ccgggtttggcaacgagga

SEQ ID NO: 10499 - DNA, 16 bp, Homo sapiens
ccggtaccctcgctcc

SEQ ID NO: 10500 - DNA, 18 bp, Homo sapiens
ccggtaggctgctgcggc

SEQ ID NO: 10501 - DNA, 17 bp, Homo sapiens
ccggtcaggcctagggt

SEQ ID NO: 10502 - DNA, 22 bp, Homo sapiens
ccggtcccgcggtcgcagctcc

SEQ ID NO: 10503 - DNA, 17 bp, Homo sapiens
ccggtcctgggtcggga

SEQ ID NO: 10504 - DNA, 19 bp, Homo sapiens
ccggtcgcccagacatggc

SEQ ID NO: 10505 - DNA, 16 bp, Homo sapiens
ccggtcgcgccctcgc

SEQ ID NO: 10506 - DNA, 21 bp, Homo sapiens
ccggtcggtgggtgcctcggc

SEQ ID NO: 10507 - DNA, 18 bp, Homo sapiens
ccggtgaaaaggctgcag

SEQ ID NO: 10508 - DNA, 17 bp, Homo sapiens
ccggtgactcagggagg

SEQ ID NO: 10509 - DNA, 18 bp, Homo sapiens
ccggtgagccgcatggag

SEQ ID NO: 10510 - DNA, 18 bp, Homo sapiens
ccggtgcacgttggagtc

SEQ ID NO: 10511 - DNA, 18 bp, Homo sapiens
ccggtgcatggcggtctg

SEQ ID NO: 10512 - DNA, 23 bp, Homo sapiens
ccggtgcccggggcggggcggag

SEQ ID NO: 10513 - DNA, 21 bp, Homo sapiens
ccggtgcggcgcagaagcccc

SEQ ID NO: 10514 - DNA, 18 bp, Homo sapiens
ccggtggacggaagtggg

SEQ ID NO: 10515 - DNA, 24 bp, Homo sapiens
ccggtggcttccaaggcgactccg

SEQ ID NO: 10516 - DNA, 20 bp, Homo sapiens
ccggtgggcggggacgtgta

SEQ ID NO: 10517 - DNA, 18 bp, Homo sapiens
ccggtgtctctgcaatgg

SEQ ID NO: 10518 - DNA, 21 bp, Homo sapiens
ccggttccgcggcccaggcag

SEQ ID NO: 10519 - DNA, 17 bp, Homo sapiens
ccggttccggcgtggcc

SEQ ID NO: 10520 - DNA, 20 bp, Homo sapiens
ccggttccggtgggcctcca

SEQ ID NO: 10521 - DNA, 18 bp, Homo sapiens
ccggttcgggctcgcgag

SEQ ID NO: 10522 - DNA, 19 bp, Homo sapiens
ccggttgcgggcagtggac

SEQ ID NO: 10523 - DNA, 18 bp, Homo sapiens
ccgtacggtggacggcga

SEQ ID NO: 10524 - DNA, 18 bp, Homo sapiens
ccgtacgtccgtttgtcc

SEQ ID NO: 10525 - DNA, 18 bp, Homo sapiens
ccgtactaggtagatggt

SEQ ID NO: 10526 - DNA, 20 bp, Homo sapiens
ccgtagaaggagacctgctt

SEQ ID NO: 10527 - DNA, 18 bp, Homo sapiens
ccgtagagatgggcaggg

SEQ ID NO: 10528 - DNA, 18 bp, Homo sapiens
ccgtagcctcttccggcg

SEQ ID NO: 10529 - DNA, 19 bp, Homo sapiens
ccgtagcctcttccggcga

SEQ ID NO: 10530 - DNA, 17 bp, Homo sapiens
ccgtaggctaacgtgga

SEQ ID NO: 10531 - DNA, 20 bp, Homo sapiens
ccgtccaagggcccgctgca

SEQ ID NO: 10532 - DNA, 17 bp, Homo sapiens
ccgtcgggctcctcggc

SEQ ID NO: 10533 - DNA, 17 bp, Homo sapiens
ccgtcgggtaaggtccc

SEQ ID NO: 10534 - DNA, 21 bp, Homo sapiens
ccgtctctggagagcagcagg

SEQ ID NO: 10535 - DNA, 19 bp, Homo sapiens
ccgtctgaggtggcggtcg

SEQ ID NO: 10536 - DNA, 19 bp, Homo sapiens
ccgtctgcgagcctcccga

SEQ ID NO: 10537 - DNA, 17 bp, Homo sapiens
ccgtgacccagttcgac

SEQ ID NO: 10538 - DNA, 20 bp, Homo sapiens
ccgtgagagggccttcgcgg

SEQ ID NO: 10539 - DNA, 22 bp, Homo sapiens
ccgtgatcgtgcgccgaggccc

SEQ ID NO: 10540 - DNA, 17 bp, Homo sapiens
gtaaggccgaggttgcg

SEQ ID NO: 10541 - DNA, 18 bp, Homo sapiens
gtaaggccgaggttgcgg

SEQ ID NO: 10542 - DNA, 18 bp, Homo sapiens
gtaagtaggagggctttc

SEQ ID NO: 10543 - DNA, 24 bp, Homo sapiens
gtaataaagcgggcagcaggatgg

SEQ ID NO: 10544 - DNA, 21 bp, Homo sapiens
gtaatagtgcgggtagtgggt

SEQ ID NO: 10545 - DNA, 18 bp, Homo sapiens
gtaatcgccgtcctttgg

SEQ ID NO: 10546 - DNA, 18 bp, Homo sapiens
gtaatgctgagacagact

SEQ ID NO: 10547 - DNA, 21 bp, Homo sapiens
gtaatggcaggcgttcggtca

SEQ ID NO: 10548 - DNA, 18 bp, Homo sapiens
gtacagggaagtctcgcc

SEQ ID NO: 10549 - DNA, 19 bp, Homo sapiens
gtaccatggacgtgggcga

SEQ ID NO: 10550 - DNA, 18 bp, Homo sapiens
gtaccgcgagcaaggagc

SEQ ID NO: 10551 - DNA, 17 bp, Homo sapiens
gtaccttgatttcgtat

SEQ ID NO: 10552 - DNA, 17 bp, Homo sapiens
gtacgacgcggatgagg

SEQ ID NO: 10553 - DNA, 22 bp, Homo sapiens
gtacgggtccgactgaggggta

SEQ ID NO: 10554 - DNA, 16 bp, Homo sapiens
gtacgtccgtttgtcc

SEQ ID NO: 10555 - DNA, 19 bp, Homo sapiens
gtacgtccgtttgtccgga

SEQ ID NO: 10556 - DNA, 19 bp, Homo sapiens
gtactactttaggaacagg

SEQ ID NO: 10557 - DNA, 20 bp, Homo sapiens
gtactaggcactgctgagct

SEQ ID NO: 10558 - DNA, 16 bp, Homo sapiens
gtactgggacacgggg

SEQ ID NO: 10559 - DNA, 19 bp, Homo sapiens
gtactgggatgggtaggtg

SEQ ID NO: 10560 - DNA, 22 bp, Homo sapiens
gtactgggcagaacgcgacggg

SEQ ID NO: 10561 - DNA, 17 bp, Homo sapiens
gtactgggtcggcgcgg

SEQ ID NO: 10562 - DNA, 18 bp, Homo sapiens
gtagaaggcgccgggacc

SEQ ID NO: 10563 - DNA, 21 bp, Homo sapiens
gtagacggacagaggagtcgt

SEQ ID NO: 10564 - DNA, 16 bp, Homo sapiens
gtagacggagccgcag

SEQ ID NO: 10565 - DNA, 20 bp, Homo sapiens
gtagatgctggagaccagca

SEQ ID NO: 10566 - DNA, 20 bp, Homo sapiens
gtagattgagtggctagaga

SEQ ID NO: 10567 - DNA, 18 bp, Homo sapiens
gtagcatgtgcgggagac

SEQ ID NO: 10568 - DNA, 19 bp, Homo sapiens
gtagccgtggagactgtta

SEQ ID NO: 10569 - DNA, 17 bp, Homo sapiens
gtagcctcttccggcga

SEQ ID NO: 10570 - DNA, 21 bp, Homo sapiens
gtagcgcttcggagagactgc

SEQ ID NO: 10571 - DNA, 18 bp, Homo sapiens
gtagcggaggggaggtcg

SEQ ID NO: 10572 - DNA, 19 bp, Homo sapiens
gtagcggcggcgggaaatc

SEQ ID NO: 10573 - DNA, 17 bp, Homo sapiens
gtagcggtcgaggcttt

SEQ ID NO: 10574 - DNA, 18 bp, Homo sapiens
gtagctgcagggcgagcc

SEQ ID NO: 10575 - DNA, 17 bp, Homo sapiens
gtagcttgtaccgagcg

SEQ ID NO: 10576 - DNA, 16 bp, Homo sapiens
gtaggacggtagccgg

SEQ ID NO: 10577 - DNA, 19 bp, Homo sapiens
gtaggacggtagccggtat

SEQ ID NO: 10578 - DNA, 18 bp, Homo sapiens
gtaggagaaacccggccc

SEQ ID NO: 10579 - DNA, 18 bp, Homo sapiens
gtaggagggagctggccc

SEQ ID NO: 10580 - DNA, 17 bp, Homo sapiens
gtaggagggatttcggc

SEQ ID NO: 10581 - DNA, 17 bp, Homo sapiens
gtaggatggcgtctggc

SEQ ID NO: 10582 - DNA, 18 bp, Homo sapiens
gtaggcacagtgggcggg

SEQ ID NO: 10583 - DNA, 23 bp, Homo sapiens
gtaggcggcgcgggagggaaaag

SEQ ID NO: 10584 - DNA, 20 bp, Homo sapiens
gtaggcggctgtagcggaga

SEQ ID NO: 10585 - DNA, 18 bp, Homo sapiens
gtaggcttggtggactgt

SEQ ID NO: 10586 - DNA, 18 bp, Homo sapiens
gtagggacgggaggcgag

SEQ ID NO: 10587 - DNA, 17 bp, Homo sapiens
gtagggagagaggagtt

SEQ ID NO: 10588 - DNA, 17 bp, Homo sapiens
gtagggttgcgcggccc

SEQ ID NO: 10589 - DNA, 18 bp, Homo sapiens
gtaggtaggggctgctta

SEQ ID NO: 10590 - DNA, 17 bp, Homo sapiens
gtaggttggcggcctgc

SEQ ID NO: 10591 - DNA, 19 bp, Homo sapiens
gtaggttgggagtggaagg

SEQ ID NO: 10592 - DNA, 18 bp, Homo sapiens
gtagtagcctggctttgc

SEQ ID NO: 10593 - DNA, 16 bp, Homo sapiens
gtagtaggacggtagc

SEQ ID NO: 10594 - DNA, 19 bp, Homo sapiens
gtagtaggacggtagccgg

SEQ ID NO: 10595 - DNA, 18 bp, Homo sapiens
gtagtcacgagggacggg

SEQ ID NO: 10596 - DNA, 19 bp, Homo sapiens
gtagtcatggccgccttcc

SEQ ID NO: 10597 - DNA, 18 bp, Homo sapiens
ccgtgcgcccggttgcag

SEQ ID NO: 10598 - DNA, 19 bp, Homo sapiens
ccgtgcggaggtgctcctc

SEQ ID NO: 10599 - DNA, 20 bp, Homo sapiens
ccgtgctgcttatggcggcg

SEQ ID NO: 10600 - DNA, 19 bp, Homo sapiens
ccgtgctgggagcggcgcg

SEQ ID NO: 10601 - DNA, 23 bp, Homo sapiens
ccgtggactgcaggaggcggggc

SEQ ID NO: 10602 - DNA, 18 bp, Homo sapiens
ccgtggaggccgccgacg

SEQ ID NO: 10603 - DNA, 20 bp, Homo sapiens
ccgtggcagcctgaacggag

SEQ ID NO: 10604 - DNA, 18 bp, Homo sapiens
ccgtggcgcccgagtgca

SEQ ID NO: 10605 - DNA, 22 bp, Homo sapiens
ccgtggctggcccgtggggcga

SEQ ID NO: 10606 - DNA, 23 bp, Homo sapiens
ccgtggctggcccgtggggcgag

SEQ ID NO: 10607 - DNA, 19 bp, Homo sapiens
ccgtggtccggacagtgcg

SEQ ID NO: 10608 - DNA, 20 bp, Homo sapiens
ccgtggtcctcccgtaggaa

SEQ ID NO: 10609 - DNA, 17 bp, Homo sapiens
ccgtgttctggaggcga

SEQ ID NO: 10610 - DNA, 20 bp, Homo sapiens
ccgtgttgcattttgtttag

SEQ ID NO: 10611 - DNA, 18 bp, Homo sapiens
ccgtgtttcctctttcgg

SEQ ID NO: 10612 - DNA, 20 bp, Homo sapiens
ccgtgtttcctctttcggcc

SEQ ID NO: 10613 - DNA, 19 bp, Homo sapiens
ccgttcccggtcctttctc

SEQ ID NO: 10614 - DNA, 18 bp, Homo sapiens
ccgttccgccggagctga

SEQ ID NO: 10615 - DNA, 18 bp, Homo sapiens
ccgttctttggccctgtg

SEQ ID NO: 10616 - DNA, 18 bp, Homo sapiens
ccgttgctggggcttgcg

SEQ ID NO: 10617 - DNA, 18 bp, Homo sapiens
ccgttggtccgcgcgttg

SEQ ID NO: 10618 - DNA, 18 bp, Homo sapiens
ccgttgttcccgagacgt

SEQ ID NO: 10619 - DNA, 18 bp, Homo sapiens
ccgtttcccggcatgcgc

SEQ ID NO: 10620 - DNA, 18 bp, Homo sapiens
ccgtttctcgaggatcca

SEQ ID NO: 10621 - DNA, 16 bp, Homo sapiens
ccgtttttgctcagaa

SEQ ID NO: 10622 - DNA, 17 bp, Homo sapiens
cctacagggcggtcgag

SEQ ID NO: 10623 - DNA, 20 bp, Homo sapiens
cctaccatcgtttcttcctg

SEQ ID NO: 10624 - DNA, 18 bp, Homo sapiens
cctagaagggaaaaggac

SEQ ID NO: 10625 - DNA, 21 bp, Homo sapiens
cctagagaggaggggcatgga

SEQ ID NO: 10626 - DNA, 18 bp, Homo sapiens
cctagagcggacagggcg

SEQ ID NO: 10627 - DNA, 23 bp, Homo sapiens
cctagaggagcacctggagaagt

SEQ ID NO: 10628 - DNA, 17 bp, Homo sapiens
cctagaggttgagcggt

SEQ ID NO: 10629 - DNA, 21 bp, Homo sapiens
cctagcactctgacctagcag

SEQ ID NO: 10630 - DNA, 18 bp, Homo sapiens
cctagcctggcgggggcg

SEQ ID NO: 10631 - DNA, 18 bp, Homo sapiens
cctagctcgggaccggcc

SEQ ID NO: 10632 - DNA, 16 bp, Homo sapiens
cctagctggggaaacg

SEQ ID NO: 10633 - DNA, 17 bp, Homo sapiens
cctaggatctgtgactg

SEQ ID NO: 10634 - DNA, 19 bp, Homo sapiens
cctaggcgcttcgccgagg

SEQ ID NO: 10635 - DNA, 19 bp, Homo sapiens
cctagggtgggacgatggc

SEQ ID NO: 10636 - DNA, 18 bp, Homo sapiens
cctatacgggtaaagtgg

SEQ ID NO: 10637 - DNA, 18 bp, Homo sapiens
cctcaagcggaaggtgag

SEQ ID NO: 10638 - DNA, 16 bp, Homo sapiens
cctcacaacctgggaa

SEQ ID NO: 10639 - DNA, 20 bp, Homo sapiens
cctcacttactccaggatga

SEQ ID NO: 10640 - DNA, 18 bp, Homo sapiens
cctcagaaagtcagagta

SEQ ID NO: 10641 - DNA, 19 bp, Homo sapiens
cctcagatcggtggacgtg

SEQ ID NO: 10642 - DNA, 18 bp, Homo sapiens
cctcagccgccgcctctg

SEQ ID NO: 10643 - DNA, 17 bp, Homo sapiens
cctcagcgtcttggcgg

SEQ ID NO: 10644 - DNA, 18 bp, Homo sapiens
cctcaggccttgggcctc

SEQ ID NO: 10645 - DNA, 21 bp, Homo sapiens
cctcagggagggtgagtcggc

SEQ ID NO: 10646 - DNA, 18 bp, Homo sapiens
cctcaggggggccagatt

SEQ ID NO: 10647 - DNA, 24 bp, Homo sapiens
cctcagggtccaactgggggtagc

SEQ ID NO: 10648 - DNA, 18 bp, Homo sapiens
cctcagtcggacgggcgc

SEQ ID NO: 10649 - DNA, 17 bp, Homo sapiens
cctcagtgcgcatccgg

SEQ ID NO: 10650 - DNA, 18 bp, Homo sapiens
cctccaaggggcgggcag

SEQ ID NO: 10651 - DNA, 18 bp, Homo sapiens
cctccacaccccttgcgc

SEQ ID NO: 10652 - DNA, 18 bp, Homo sapiens
cctccagagactgacgag

SEQ ID NO: 10653 - DNA, 18 bp, Homo sapiens
cctcccacccgcactgca

SEQ ID NO: 10654 - DNA, 18 bp, Homo sapiens
gtagtccctcagtgcgca

SEQ ID NO: 10655 - DNA, 19 bp, Homo sapiens
gtagtccctcagtgcgcat

SEQ ID NO: 10656 - DNA, 20 bp, Homo sapiens
gtagtccctcagtgcgcatc

SEQ ID NO: 10657 - DNA, 18 bp, Homo sapiens
gtagtcgcggagacgggg

SEQ ID NO: 10658 - DNA, 19 bp, Homo sapiens
gtagtctcggaggcggcgc

SEQ ID NO: 10659 - DNA, 17 bp, Homo sapiens
gtagtgaggcctagtgg

SEQ ID NO: 10660 - DNA, 16 bp, Homo sapiens
gtagtggataggcctg

SEQ ID NO: 10661 - DNA, 18 bp, Homo sapiens
gtagtgggctgggccggg

SEQ ID NO: 10662 - DNA, 19 bp, Homo sapiens
gtagtgggctgggccgggg

SEQ ID NO: 10663 - DNA, 21 bp, Homo sapiens
gtagttatgtctggtcgcggc

SEQ ID NO: 10664 - DNA, 17 bp, Homo sapiens
gtagttggcatctccgc

SEQ ID NO: 10665 - DNA, 16 bp, Homo sapiens
gtatacgggtagggcg

SEQ ID NO: 10666 - DNA, 18 bp, Homo sapiens
gtatagacccggctagaa

SEQ ID NO: 10667 - DNA, 19 bp, Homo sapiens
gtatagacccggctagaat

SEQ ID NO: 10668 - DNA, 18 bp, Homo sapiens
gtatccgggtcgctgctt

SEQ ID NO: 10669 - DNA, 18 bp, Homo sapiens
gtatcgcgatccacttaa

SEQ ID NO: 10670 - DNA, 20 bp, Homo sapiens
gtatcggaaagcaagcctac

SEQ ID NO: 10671 - DNA, 16 bp, Homo sapiens
gtatcggcgtaggggc

SEQ ID NO: 10672 - DNA, 22 bp, Homo sapiens
gtatgagaggcagagatcgggg

SEQ ID NO: 10673 - DNA, 22 bp, Homo sapiens
gtatgtctggacgtggcaagca

SEQ ID NO: 10674 - DNA, 18 bp, Homo sapiens
gtattctggcgccgctga

SEQ ID NO: 10675 - DNA, 18 bp, Homo sapiens
gtattgctgcttcggcga

SEQ ID NO: 10676 - DNA, 20 bp, Homo sapiens
gtcaaaggtcagaggtaaag

SEQ ID NO: 10677 - DNA, 17 bp, Homo sapiens
gtcaagatggaggagta

SEQ ID NO: 10678 - DNA, 16 bp, Homo sapiens
gtcaaggcgacatcgc

SEQ ID NO: 10679 - DNA, 17 bp, Homo sapiens
gtcacaggtaactccca

SEQ ID NO: 10680 - DNA, 19 bp, Homo sapiens
gtcacatgcaacatttaca

SEQ ID NO: 10681 - DNA, 20 bp, Homo sapiens
gtcaccacctcccgcaagtg

SEQ ID NO: 10682 - DNA, 18 bp, Homo sapiens
gtcacgtgatccgacaaa

SEQ ID NO: 10683 - DNA, 18 bp, Homo sapiens
gtcactgttggtgcgggc

SEQ ID NO: 10684 - DNA, 22 bp, Homo sapiens
gtcacttccgcttcctttcccg

SEQ ID NO: 10685 - DNA, 19 bp, Homo sapiens
gtcacttctcaaagcatct

SEQ ID NO: 10686 - DNA, 18 bp, Homo sapiens
gtcagaacggccgatctc

SEQ ID NO: 10687 - DNA, 21 bp, Homo sapiens
gtcagaggtaaagaagtcatg

SEQ ID NO: 10688 - DNA, 19 bp, Homo sapiens
gtcagaggtgagttaggcg

SEQ ID NO: 10689 - DNA, 17 bp, Homo sapiens
gtcagaggttacagaca

SEQ ID NO: 10690 - DNA, 19 bp, Homo sapiens
gtcagagttggtctgttac

SEQ ID NO: 10691 - DNA, 18 bp, Homo sapiens
gtcagataaatcggcggg

SEQ ID NO: 10692 - DNA, 16 bp, Homo sapiens
gtcagccactgtctaa

SEQ ID NO: 10693 - DNA, 18 bp, Homo sapiens
gtcagccgagggccgaaa

SEQ ID NO: 10694 - DNA, 17 bp, Homo sapiens
gtcagggagggtaaggc

SEQ ID NO: 10695 - DNA, 18 bp, Homo sapiens
gtcagtcactggggcgga

SEQ ID NO: 10696 - DNA, 18 bp, Homo sapiens
gtcagtggaggtggagtt

SEQ ID NO: 10697 - DNA, 19 bp, Homo sapiens
gtcagttcgcggagaggga

SEQ ID NO: 10698 - DNA, 17 bp, Homo sapiens
gtcagttgctccgctgc

SEQ ID NO: 10699 - DNA, 18 bp, Homo sapiens
gtcagttgtggagtggcg

SEQ ID NO: 10700 - DNA, 17 bp, Homo sapiens
gtcagtttccctcaaga

SEQ ID NO: 10701 - DNA, 18 bp, Homo sapiens
gtcatacggaccggattg

SEQ ID NO: 10702 - DNA, 17 bp, Homo sapiens
gtcatcgttgcccgacc

SEQ ID NO: 10703 - DNA, 20 bp, Homo sapiens
gtcatgctcggagagccccg

SEQ ID NO: 10704 - DNA, 17 bp, Homo sapiens
gtcatggaggacgccgc

SEQ ID NO: 10705 - DNA, 18 bp, Homo sapiens
gtcatggaggacgccgcc

SEQ ID NO: 10706 - DNA, 16 bp, Homo sapiens
gtcatggccgccttcc

SEQ ID NO: 10707 - DNA, 16 bp, Homo sapiens
gtcatggcggatggtc

SEQ ID NO: 10708 - DNA, 19 bp, Homo sapiens
gtcatgtgactgggaagat

SEQ ID NO: 10709 - DNA, 17 bp, Homo sapiens
gtccaacatggcggcgc

SEQ ID NO: 10710 - DNA, 19 bp, Homo sapiens
gtccaacatggcggcgccc

SEQ ID NO: 10711 - DNA, 22 bp, Homo sapiens
cctccccagccttccccgcgag

SEQ ID NO: 10712 - DNA, 17 bp, Homo sapiens
cctcccccggggactgg

SEQ ID NO: 10713 - DNA, 20 bp, Homo sapiens
cctcccgacatcccgccttg

SEQ ID NO: 10714 - DNA, 16 bp, Homo sapiens
cctcccgcgcggtcac

SEQ ID NO: 10715 - DNA, 24 bp, Homo sapiens
cctcccggcgctgctccccgcccc

SEQ ID NO: 10716 - DNA, 18 bp, Homo sapiens
cctcccggggtttgtagc

SEQ ID NO: 10717 - DNA, 18 bp, Homo sapiens
cctccctccgcggagcag

SEQ ID NO: 10718 - DNA, 18 bp, Homo sapiens
cctccctctcccagccaa

SEQ ID NO: 10719 - DNA, 21 bp, Homo sapiens
cctccctgcacgtacgggccc

SEQ ID NO: 10720 - DNA, 18 bp, Homo sapiens
cctccgccggcagcaact

SEQ ID NO: 10721 - DNA, 18 bp, Homo sapiens
cctccgcgtgggatcgtg

SEQ ID NO: 10722 - DNA, 19 bp, Homo sapiens
cctccgctcgattggttct

SEQ ID NO: 10723 - DNA, 18 bp, Homo sapiens
cctccggacggattgccc

SEQ ID NO: 10724 - DNA, 18 bp, Homo sapiens
cctccggaggccggggac

SEQ ID NO: 10725 - DNA, 16 bp, Homo sapiens
cctccggatcggaccc

SEQ ID NO: 10726 - DNA, 18 bp, Homo sapiens
cctccggccgcacttcca

SEQ ID NO: 10727 - DNA, 19 bp, Homo sapiens
cctccggccttgtgtgtcc

SEQ ID NO: 10728 - DNA, 18 bp, Homo sapiens
cctcgaccgctcgcagta

SEQ ID NO: 10729 - DNA, 16 bp, Homo sapiens
cctcgcgaggtgagtg

SEQ ID NO: 10730 - DNA, 18 bp, Homo sapiens
cctcgcggccgtaggcta

SEQ ID NO: 10731 - DNA, 17 bp, Homo sapiens
cctcgcggtggacatct

SEQ ID NO: 10732 - DNA, 22 bp, Homo sapiens
cctcggcgcacagtaatggcag

SEQ ID NO: 10733 - DNA, 15 bp, Homo sapiens
cctcggcgcgactcg

SEQ ID NO: 10734 - DNA, 18 bp, Homo sapiens
cctcgggcaagatggcta

SEQ ID NO: 10735 - DNA, 18 bp, Homo sapiens
cctcggggtgagtagggg

SEQ ID NO: 10736 - DNA, 19 bp, Homo sapiens
cctcgtctgccagccggct

SEQ ID NO: 10737 - DNA, 21 bp, Homo sapiens
cctcgtgtcctcccttcatcc

SEQ ID NO: 10738 - DNA, 23 bp, Homo sapiens
cctctacctccgtccttctcgcc

SEQ ID NO: 10739 - DNA, 20 bp, Homo sapiens
cctctcagcggcggtggccc

SEQ ID NO: 10740 - DNA, 18 bp, Homo sapiens
cctctccggattctgtta

SEQ ID NO: 10741 - DNA, 21 bp, Homo sapiens
cctctcctaacctcgctctcg

SEQ ID NO: 10742 - DNA, 20 bp, Homo sapiens
cctctgcaggaacccggcga

SEQ ID NO: 10743 - DNA, 18 bp, Homo sapiens
cctctggcaagatggctg

SEQ ID NO: 10744 - DNA, 18 bp, Homo sapiens
cctctggcgaacatggcg

SEQ ID NO: 10745 - DNA, 17 bp, Homo sapiens
cctctgtcgtcgtcgcg

SEQ ID NO: 10746 - DNA, 19 bp, Homo sapiens
cctcttccgtgaggcgcgc

SEQ ID NO: 10747 - DNA, 18 bp, Homo sapiens
cctcttgagcccacttta

SEQ ID NO: 10748 - DNA, 18 bp, Homo sapiens
cctcttgcgtcgaggctg

SEQ ID NO: 10749 - DNA, 21 bp, Homo sapiens
cctctttccctcggagcgggc

SEQ ID NO: 10750 - DNA, 17 bp, Homo sapiens
cctctttctcgactcca

SEQ ID NO: 10751 - DNA, 20 bp, Homo sapiens
cctgaaccggagcccgagcc

SEQ ID NO: 10752 - DNA, 18 bp, Homo sapiens
cctgaacgaggtagacca

SEQ ID NO: 10753 - DNA, 19 bp, Homo sapiens
cctgaagacctggcggagc

SEQ ID NO: 10754 - DNA, 23 bp, Homo sapiens
cctgaagcgaggggtgagtgacc

SEQ ID NO: 10755 - DNA, 18 bp, Homo sapiens
cctgaccacgctccatac

SEQ ID NO: 10756 - DNA, 18 bp, Homo sapiens
cctgacgcggccggagcg

SEQ ID NO: 10757 - DNA, 18 bp, Homo sapiens
cctgacggtgcagcagcc

SEQ ID NO: 10758 - DNA, 17 bp, Homo sapiens
cctgacgtggtgggctg

SEQ ID NO: 10759 - DNA, 18 bp, Homo sapiens
cctgactgaaggaggcca

SEQ ID NO: 10760 - DNA, 18 bp, Homo sapiens
cctgactgagaagaggac

SEQ ID NO: 10761 - DNA, 18 bp, Homo sapiens
cctgactggaagcccgag

SEQ ID NO: 10762 - DNA, 18 bp, Homo sapiens
cctgactgtggagatggc

SEQ ID NO: 10763 - DNA, 24 bp, Homo sapiens
cctgacttcccgactgggagcctt

SEQ ID NO: 10764 - DNA, 21 bp, Homo sapiens
cctgagaggacgcctctggag

SEQ ID NO: 10765 - DNA, 21 bp, Homo sapiens
cctgagcggatgctggggctg

SEQ ID NO: 10766 - DNA, 18 bp, Homo sapiens
cctgaggaggactgccgg

SEQ ID NO: 10767 - DNA, 17 bp, Homo sapiens
cctgaggccgagggcac

SEQ ID NO: 10768 - DNA, 17 bp, Homo sapiens
gtccaaccaaacagccg

SEQ ID NO: 10769 - DNA, 18 bp, Homo sapiens
gtccacagattcgctttg

SEQ ID NO: 10770 - DNA, 17 bp, Homo sapiens
gtccacgtccggatctg

SEQ ID NO: 10771 - DNA, 19 bp, Homo sapiens
gtccagcagaaacggcggc

SEQ ID NO: 10772 - DNA, 18 bp, Homo sapiens
gtccaggtctaagcggcg

SEQ ID NO: 10773 - DNA, 18 bp, Homo sapiens
gtccagtggctgaccgcc

SEQ ID NO: 10774 - DNA, 18 bp, Homo sapiens
gtccattgcgaagagaaa

SEQ ID NO: 10775 - DNA, 21 bp, Homo sapiens
gtcccacgggccagccccgcc

SEQ ID NO: 10776 - DNA, 17 bp, Homo sapiens
gtccccacctggttgga

SEQ ID NO: 10777 - DNA, 15 bp, Homo sapiens
gtccccgcgaggggc

SEQ ID NO: 10778 - DNA, 15 bp, Homo sapiens
gtccccgcgaggggg

SEQ ID NO: 10779 - DNA, 18 bp, Homo sapiens
gtccccggtgtgtgggtc

SEQ ID NO: 10780 - DNA, 16 bp, Homo sapiens
gtcccctgaccgttgg

SEQ ID NO: 10781 - DNA, 18 bp, Homo sapiens
gtcccctgaggcgtgcgc

SEQ ID NO: 10782 - DNA, 15 bp, Homo sapiens
gtcccgagccggtca

SEQ ID NO: 10783 - DNA, 18 bp, Homo sapiens
gtcccgcaaggaaggtac

SEQ ID NO: 10784 - DNA, 21 bp, Homo sapiens
gtcccgcggcggcggcgagca

SEQ ID NO: 10785 - DNA, 22 bp, Homo sapiens
gtcccgctggcctggcaggtga

SEQ ID NO: 10786 - DNA, 19 bp, Homo sapiens
gtcccggagagctgagcag

SEQ ID NO: 10787 - DNA, 19 bp, Homo sapiens
gtcccgggctggcgggagt

SEQ ID NO: 10788 - DNA, 16 bp, Homo sapiens
gtcccgggcttgggga

SEQ ID NO: 10789 - DNA, 18 bp, Homo sapiens
gtccctcagtgcgcatcc

SEQ ID NO: 10790 - DNA, 20 bp, Homo sapiens
gtccctcagtgcgcatccgg

SEQ ID NO: 10791 - DNA, 18 bp, Homo sapiens
gtccgcagcgcccgcggc

SEQ ID NO: 10792 - DNA, 18 bp, Homo sapiens
gtccgcagtagttcgggc

SEQ ID NO: 10793 - DNA, 19 bp, Homo sapiens
gtccgcgcgctctctggca

SEQ ID NO: 10794 - DNA, 19 bp, Homo sapiens
gtccgcggcctatttaccc

SEQ ID NO: 10795 - DNA, 18 bp, Homo sapiens
gtccggagctggtgagga

SEQ ID NO: 10796 - DNA, 18 bp, Homo sapiens
gtccggcgagaggggctg

SEQ ID NO: 10797 - DNA, 21 bp, Homo sapiens
gtccggcggctcctctatcag

SEQ ID NO: 10798 - DNA, 18 bp, Homo sapiens
gtccggctgggccgggac

SEQ ID NO: 10799 - DNA, 18 bp, Homo sapiens
gtccgggcgccgccatgg

SEQ ID NO: 10800 - DNA, 21 bp, Homo sapiens
gtccgggtccggcttgcgggg

SEQ ID NO: 10801 - DNA, 18 bp, Homo sapiens
gtccgtggcggctgcacg

SEQ ID NO: 10802 - DNA, 19 bp, Homo sapiens
gtcctagcctggcgggggc

SEQ ID NO: 10803 - DNA, 24 bp, Homo sapiens
gtcctcagggagggtgagtcggcg

SEQ ID NO: 10804 - DNA, 21 bp, Homo sapiens
gtcctccggttggcggcggct

SEQ ID NO: 10805 - DNA, 18 bp, Homo sapiens
gtcctgccagggtagaat

SEQ ID NO: 10806 - DNA, 19 bp, Homo sapiens
gtcctggtcgttgttcccg

SEQ ID NO: 10807 - DNA, 20 bp, Homo sapiens
gtcctgtgtttaccgataga

SEQ ID NO: 10808 - DNA, 18 bp, Homo sapiens
gtccttctctggggcggt

SEQ ID NO: 10809 - DNA, 21 bp, Homo sapiens
gtccttctgttaacaggtgca

SEQ ID NO: 10810 - DNA, 18 bp, Homo sapiens
gtccttgtccagtgaaac

SEQ ID NO: 10811 - DNA, 18 bp, Homo sapiens
gtcctttgcgcggcacct

SEQ ID NO: 10812 - DNA, 17 bp, Homo sapiens
gtcgaaggtccgggcgg

SEQ ID NO: 10813 - DNA, 22 bp, Homo sapiens
gtcgactcctgtgaggtatgtt

SEQ ID NO: 10814 - DNA, 18 bp, Homo sapiens
gtcgactgcggctcttcc

SEQ ID NO: 10815 - DNA, 19 bp, Homo sapiens
gtcgagatggaggaagatg

SEQ ID NO: 10816 - DNA, 19 bp, Homo sapiens
gtcgagcagcggacgccgg

SEQ ID NO: 10817 - DNA, 22 bp, Homo sapiens
gtcgagcgtcgagctcccaaaa

SEQ ID NO: 10818 - DNA, 21 bp, Homo sapiens
gtcgagctcgccgcggactca

SEQ ID NO: 10819 - DNA, 20 bp, Homo sapiens
gtcgaggcgtcgggagggcc

SEQ ID NO: 10820 - DNA, 18 bp, Homo sapiens
gtcgaggctgcaaaatgg

SEQ ID NO: 10821 - DNA, 18 bp, Homo sapiens
gtcgatcacctccgggca

SEQ ID NO: 10822 - DNA, 20 bp, Homo sapiens
gtcgcagagagagatgggcg

SEQ ID NO: 10823 - DNA, 21 bp, Homo sapiens
gtcgcccctgcgctgcgcgga

SEQ ID NO: 10824 - DNA, 19 bp, Homo sapiens
gtcgccctcagtccggctc

SEQ ID NO: 10825 - DNA, 18 bp, Homo sapiens
cctgaggcgaacaatggc

SEQ ID NO: 10826 - DNA, 19 bp, Homo sapiens
cctgaggctggcatctggg

SEQ ID NO: 10827 - DNA, 17 bp, Homo sapiens
cctgagggcgcaactga

SEQ ID NO: 10828 - DNA, 17 bp, Homo sapiens
cctgagtcgctgggtgc

SEQ ID NO: 10829 - DNA, 18 bp, Homo sapiens
cctgagtcggtccgaggc

SEQ ID NO: 10830 - DNA, 18 bp, Homo sapiens
cctgagttgccgctcggc

SEQ ID NO: 10831 - DNA, 19 bp, Homo sapiens
cctgatggtgtgactcggc

SEQ ID NO: 10832 - DNA, 21 bp, Homo sapiens
cctgcagggcgggacttcgac

SEQ ID NO: 10833 - DNA, 21 bp, Homo sapiens
cctgccaaaccagaattagcc

SEQ ID NO: 10834 - DNA, 18 bp, Homo sapiens
cctgcccaccctgacccg

SEQ ID NO: 10835 - DNA, 16 bp, Homo sapiens
cctgccgctgtcgcca

SEQ ID NO: 10836 - DNA, 14 bp, Homo sapiens
cctgcgcgcggcaa

SEQ ID NO: 10837 - DNA, 16 bp, Homo sapiens
cctgcgggaaacatgg

SEQ ID NO: 10838 - DNA, 18 bp, Homo sapiens
cctgcggttggggaccag

SEQ ID NO: 10839 - DNA, 18 bp, Homo sapiens
cctgctacgagtagaacg

SEQ ID NO: 10840 - DNA, 18 bp, Homo sapiens
cctgctgcggccgctttc

SEQ ID NO: 10841 - DNA, 18 bp, Homo sapiens
cctgcttttggtttccct

SEQ ID NO: 10842 - DNA, 18 bp, Homo sapiens
cctggaccgtagtggtag

SEQ ID NO: 10843 - DNA, 18 bp, Homo sapiens
cctggacgggagcaaggc

SEQ ID NO: 10844 - DNA, 21 bp, Homo sapiens
cctggacgggagcaaggcgag

SEQ ID NO: 10845 - DNA, 19 bp, Homo sapiens
cctggagagaaggcgctgg

SEQ ID NO: 10846 - DNA, 17 bp, Homo sapiens
cctggaggtggagggcg

SEQ ID NO: 10847 - DNA, 23 bp, Homo sapiens
cctggcatctggagggaccaccg

SEQ ID NO: 10848 - DNA, 21 bp, Homo sapiens
cctggccatggccggcctgtc

SEQ ID NO: 10849 - DNA, 18 bp, Homo sapiens
cctggcgctacgggtttc

SEQ ID NO: 10850 - DNA, 23 bp, Homo sapiens
cctggcggcggatctggacgtgg

SEQ ID NO: 10851 - DNA, 21 bp, Homo sapiens
cctggctcagtgagtagccgc

SEQ ID NO: 10852 - DNA, 16 bp, Homo sapiens
cctggctcagtgggga

SEQ ID NO: 10853 - DNA, 18 bp, Homo sapiens
cctgggacaccgccggcg

SEQ ID NO: 10854 - DNA, 19 bp, Homo sapiens
cctgggacctagctcggga

SEQ ID NO: 10855 - DNA, 18 bp, Homo sapiens
cctgggacgcgggagccg

SEQ ID NO: 10856 - DNA, 18 bp, Homo sapiens
cctgggagagtcgctgac

SEQ ID NO: 10857 - DNA, 18 bp, Homo sapiens
cctgggcgctgctgctgg

SEQ ID NO: 10858 - DNA, 18 bp, Homo sapiens
cctgggctataagcgagc

SEQ ID NO: 10859 - DNA, 17 bp, Homo sapiens
cctgggctgccggacgg

SEQ ID NO: 10860 - DNA, 18 bp, Homo sapiens
cctgggctggacgtggtt

SEQ ID NO: 10861 - DNA, 18 bp, Homo sapiens
cctgggctgttgttgcgg

SEQ ID NO: 10862 - DNA, 18 bp, Homo sapiens
cctggggcgggacgtggg

SEQ ID NO: 10863 - DNA, 21 bp, Homo sapiens
cctgggggcccacacgtgtta

SEQ ID NO: 10864 - DNA, 17 bp, Homo sapiens
cctggtcggggtggtct

SEQ ID NO: 10865 - DNA, 18 bp, Homo sapiens
cctggtctgcgtggaggt

SEQ ID NO: 10866 - DNA, 19 bp, Homo sapiens
cctggtgagaaattgagag

SEQ ID NO: 10867 - DNA, 21 bp, Homo sapiens
cctggtgcatggtggtcggac

SEQ ID NO: 10868 - DNA, 18 bp, Homo sapiens
cctggtggccgggccctg

SEQ ID NO: 10869 - DNA, 18 bp, Homo sapiens
cctggttccaagtgggag

SEQ ID NO: 10870 - DNA, 17 bp, Homo sapiens
cctgtaaaacgctagag

SEQ ID NO: 10871 - DNA, 19 bp, Homo sapiens
cctgtaagtggctgcggcg

SEQ ID NO: 10872 - DNA, 21 bp, Homo sapiens
cctgtatagctgtaaacactg

SEQ ID NO: 10873 - DNA, 20 bp, Homo sapiens
cctgtcgccccgcctgtgca

SEQ ID NO: 10874 - DNA, 18 bp, Homo sapiens
cctgtcggctacggttcc

SEQ ID NO: 10875 - DNA, 20 bp, Homo sapiens
cctgtgaaggcgagcagacg

SEQ ID NO: 10876 - DNA, 18 bp, Homo sapiens
cctgtgcgcggtgaggtt

SEQ ID NO: 10877 - DNA, 17 bp, Homo sapiens
cctgtgctgcccctgcc

SEQ ID NO: 10878 - DNA, 18 bp, Homo sapiens
cctgtggagacgggacag

SEQ ID NO: 10879 - DNA, 18 bp, Homo sapiens
cctgtggaggtgagtgaa

SEQ ID NO: 10880 - DNA, 21 bp, Homo sapiens
cctgtggaggtgagtgaaggg

SEQ ID NO: 10881 - DNA, 18 bp, Homo sapiens
cctgtggtcatttgacgg

SEQ ID NO: 10882 - DNA, 16 bp, Homo sapiens
gtcgccgcagtaatcc

SEQ ID NO: 10883 - DNA, 20 bp, Homo sapiens
gtcgccggagtgaattgatc

SEQ ID NO: 10884 - DNA, 20 bp, Homo sapiens
gtcgcctgcgcatcggcggg

SEQ ID NO: 10885 - DNA, 16 bp, Homo sapiens
gtcgcgcaagaatgta

SEQ ID NO: 10886 - DNA, 18 bp, Homo sapiens
gtcgcgcagctgtgttcg

SEQ ID NO: 10887 - DNA, 19 bp, Homo sapiens
gtcgcgcagctgtgttcgc

SEQ ID NO: 10888 - DNA, 18 bp, Homo sapiens
gtcgcgcagggtcgggga

SEQ ID NO: 10889 - DNA, 16 bp, Homo sapiens
gtcgcgcagtcgggag

SEQ ID NO: 10890 - DNA, 18 bp, Homo sapiens
gtcgcggacgcaatggct

SEQ ID NO: 10891 - DNA, 24 bp, Homo sapiens
gtcgcggagaggacggggccggcg

SEQ ID NO: 10892 - DNA, 21 bp, Homo sapiens
gtcgcggcccgcggtggcgac

SEQ ID NO: 10893 - DNA, 20 bp, Homo sapiens
gtcgcggccgcggagacgtg

SEQ ID NO: 10894 - DNA, 20 bp, Homo sapiens
gtcgcgggagctgcaggtct

SEQ ID NO: 10895 - DNA, 21 bp, Homo sapiens
gtcgcgtcggcaccgcggagc

SEQ ID NO: 10896 - DNA, 17 bp, Homo sapiens
gtcgctactctggtgga

SEQ ID NO: 10897 - DNA, 18 bp, Homo sapiens
gtcgctccgggagctgcc

SEQ ID NO: 10898 - DNA, 17 bp, Homo sapiens
gtcgctcgcagccgtca

SEQ ID NO: 10899 - DNA, 18 bp, Homo sapiens
gtcgctgacggctgtctc

SEQ ID NO: 10900 - DNA, 18 bp, Homo sapiens
gtcgctgcggcgcccgag

SEQ ID NO: 10901 - DNA, 18 bp, Homo sapiens
gtcgctgctgtgcagagc

SEQ ID NO: 10902 - DNA, 18 bp, Homo sapiens
gtcgctggcggctgagga

SEQ ID NO: 10903 - DNA, 16 bp, Homo sapiens
gtcgctgggaaggaag

SEQ ID NO: 10904 - DNA, 16 bp, Homo sapiens
gtcgcttcggccagtg

SEQ ID NO: 10905 - DNA, 19 bp, Homo sapiens
gtcggacgcggcgctggaa

SEQ ID NO: 10906 - DNA, 17 bp, Homo sapiens
gtcggagatgtggcgac

SEQ ID NO: 10907 - DNA, 22 bp, Homo sapiens
gtcggagctcatggggctgtcg

SEQ ID NO: 10908 - DNA, 17 bp, Homo sapiens
gtcggcaaggagagacg

SEQ ID NO: 10909 - DNA, 18 bp, Homo sapiens
gtcggcgacgcctcagag

SEQ ID NO: 10910 - DNA, 18 bp, Homo sapiens
gtcggcgctttaggggaa

SEQ ID NO: 10911 - DNA, 15 bp, Homo sapiens
gtcggcggcccggcg

SEQ ID NO: 10912 - DNA, 18 bp, Homo sapiens
gtcgggaagcaagcatcc

SEQ ID NO: 10913 - DNA, 17 bp, Homo sapiens
gtcgggagcaggatggc

SEQ ID NO: 10914 - DNA, 17 bp, Homo sapiens
gtcgggatatcgggtgg

SEQ ID NO: 10915 - DNA, 18 bp, Homo sapiens
gtcgggatatcgggtggc

SEQ ID NO: 10916 - DNA, 20 bp, Homo sapiens
gtcgggatatcgggtggcgg

SEQ ID NO: 10917 - DNA, 18 bp, Homo sapiens
gtcgggcggaccactgca

SEQ ID NO: 10918 - DNA, 19 bp, Homo sapiens
gtcgggctcgttcgagctc

SEQ ID NO: 10919 - DNA, 18 bp, Homo sapiens
gtcgggcttcggtcgcac

SEQ ID NO: 10920 - DNA, 19 bp, Homo sapiens
gtcggggagccgcccccgc

SEQ ID NO: 10921 - DNA, 18 bp, Homo sapiens
gtcggggcagccgctcgc

SEQ ID NO: 10922 - DNA, 17 bp, Homo sapiens
gtcggtcggaccaacgg

SEQ ID NO: 10923 - DNA, 18 bp, Homo sapiens
gtcggtcggaccaacgga

SEQ ID NO: 10924 - DNA, 19 bp, Homo sapiens
gtcggtgaggcggctgcag

SEQ ID NO: 10925 - DNA, 18 bp, Homo sapiens
gtcggtgggtcggttggt

SEQ ID NO: 10926 - DNA, 21 bp, Homo sapiens
gtcggtggttagtttctgcga

SEQ ID NO: 10927 - DNA, 18 bp, Homo sapiens
gtcgtagaactgattggc

SEQ ID NO: 10928 - DNA, 18 bp, Homo sapiens
gtcgtaggcgctggccgc

SEQ ID NO: 10929 - DNA, 19 bp, Homo sapiens
gtcgtcagagctccaggga

SEQ ID NO: 10930 - DNA, 14 bp, Homo sapiens
gtcgtcgacgctgg

SEQ ID NO: 10931 - DNA, 24 bp, Homo sapiens
gtcgtgcttcaccggtctacctcg

SEQ ID NO: 10932 - DNA, 20 bp, Homo sapiens
gtcgtggacgccgtgccgtt

SEQ ID NO: 10933 - DNA, 24 bp, Homo sapiens
gtcgtgggctgcagcgcagcagca

SEQ ID NO: 10934 - DNA, 20 bp, Homo sapiens
gtcgtggtcgttcggtccta

SEQ ID NO: 10935 - DNA, 17 bp, Homo sapiens
gtcgtggtggtcgcgag

SEQ ID NO: 10936 - DNA, 19 bp, Homo sapiens
gtcgtgtcgtcgctgctgg

SEQ ID NO: 10937 - DNA, 21 bp, Homo sapiens
gtctacaacaagctgctgccc

SEQ ID NO: 10938 - DNA, 18 bp, Homo sapiens
gtctacttagccatggca

SEQ ID NO: 10939 - DNA, 17 bp, Homo sapiens
cctgtggtgacagctca

SEQ ID NO: 10940 - DNA, 22 bp, Homo sapiens
cctgtgtagcggctgcagaggg

SEQ ID NO: 10941 - DNA, 21 bp, Homo sapiens
cctgtgtgaagagtgccagtg

SEQ ID NO: 10942 - DNA, 20 bp, Homo sapiens
cctgtgtggccgccggcgtg

SEQ ID NO: 10943 - DNA, 18 bp, Homo sapiens
cctgtgtttaccgataga

SEQ ID NO: 10944 - DNA, 18 bp, Homo sapiens
ccttacggcgccggagag

SEQ ID NO: 10945 - DNA, 18 bp, Homo sapiens
ccttagctttctcccgaa

SEQ ID NO: 10946 - DNA, 21 bp, Homo sapiens
ccttagctttctcccgaacgc

SEQ ID NO: 10947 - DNA, 22 bp, Homo sapiens
ccttagctttctcccgaacgcc

SEQ ID NO: 10948 - DNA, 23 bp, Homo sapiens
ccttagctttctcccgaacgcca

SEQ ID NO: 10949 - DNA, 21 bp, Homo sapiens
ccttagtcgtcggcaggtccc

SEQ ID NO: 10950 - DNA, 22 bp, Homo sapiens
ccttatcatggtgagttggctg

SEQ ID NO: 10951 - DNA, 20 bp, Homo sapiens
ccttcagcatgctctgctca

SEQ ID NO: 10952 - DNA, 18 bp, Homo sapiens
ccttcagtctcgatgttg

SEQ ID NO: 10953 - DNA, 18 bp, Homo sapiens
ccttcagtgtctcagagg

SEQ ID NO: 10954 - DNA, 17 bp, Homo sapiens
ccttccccggcgccgcg

SEQ ID NO: 10955 - DNA, 19 bp, Homo sapiens
ccttccggcgcggggaggg

SEQ ID NO: 10956 - DNA, 21 bp, Homo sapiens
ccttcctcagcggcgggaagc

SEQ ID NO: 10957 - DNA, 20 bp, Homo sapiens
ccttcgaggagaggtcggca

SEQ ID NO: 10958 - DNA, 20 bp, Homo sapiens
ccttcgcgcagttgcccaca

SEQ ID NO: 10959 - DNA, 19 bp, Homo sapiens
ccttcggagtttgatgtga

SEQ ID NO: 10960 - DNA, 17 bp, Homo sapiens
ccttcggatgtggcgga

SEQ ID NO: 10961 - DNA, 16 bp, Homo sapiens
ccttcgggggtaggga

SEQ ID NO: 10962 - DNA, 18 bp, Homo sapiens
ccttcgtcgcgcagcctt

SEQ ID NO: 10963 - DNA, 17 bp, Homo sapiens
ccttgacacggcggacg

SEQ ID NO: 10964 - DNA, 20 bp, Homo sapiens
ccttgagcagtttgttcctc

SEQ ID NO: 10965 - DNA, 18 bp, Homo sapiens
ccttgagcgaggaggagc

SEQ ID NO: 10966 - DNA, 22 bp, Homo sapiens
ccttgccggccctgccccccgc

SEQ ID NO: 10967 - DNA, 20 bp, Homo sapiens
ccttggaagggatgagcaaa

SEQ ID NO: 10968 - DNA, 18 bp, Homo sapiens
ccttggatgtgggaggat

SEQ ID NO: 10969 - DNA, 20 bp, Homo sapiens
ccttggatgtgggaggattg

SEQ ID NO: 10970 - DNA, 20 bp, Homo sapiens
ccttgggagtcgtttctcgg

SEQ ID NO: 10971 - DNA, 17 bp, Homo sapiens
ccttgtggagccggagc

SEQ ID NO: 10972 - DNA, 20 bp, Homo sapiens
ccttgtggagccggagctgg

SEQ ID NO: 10973 - DNA, 20 bp, Homo sapiens
ccttgtgggatggcggagtt

SEQ ID NO: 10974 - DNA, 19 bp, Homo sapiens
cctttcccttcccttcccg

SEQ ID NO: 10975 - DNA, 20 bp, Homo sapiens
cctttcccttgacacggcgg

SEQ ID NO: 10976 - DNA, 21 bp, Homo sapiens
cctttcccttgacacggcgga

SEQ ID NO: 10977 - DNA, 20 bp, Homo sapiens
cctttccggcggtgacgacc

SEQ ID NO: 10978 - DNA, 18 bp, Homo sapiens
cctttctcctacccactg

SEQ ID NO: 10979 - DNA, 17 bp, Homo sapiens
cctttctttttgaggaa

SEQ ID NO: 10980 - DNA, 17 bp, Homo sapiens
cctttgatcgtcttcct

SEQ ID NO: 10981 - DNA, 22 bp, Homo sapiens
cctttggctgcgggagcgagtg

SEQ ID NO: 10982 - DNA, 24 bp, Homo sapiens
ccttttcaaaatggggttgactgg

SEQ ID NO: 10983 - DNA, 19 bp, Homo sapiens
ccttttgtttgttttcctg

SEQ ID NO: 10984 - DNA, 17 bp, Homo sapiens
cctttttgtccgacatc

SEQ ID NO: 10985 - DNA, 20 bp, Homo sapiens
cgaaacaaagggctgtccgg

SEQ ID NO: 10986 - DNA, 17 bp, Homo sapiens
cgaaactgagcaagaag

SEQ ID NO: 10987 - DNA, 18 bp, Homo sapiens
cgaaaggaaggcgccggc

SEQ ID NO: 10988 - DNA, 21 bp, Homo sapiens
cgaaaggcgagagctgcgaag

SEQ ID NO: 10989 - DNA, 17 bp, Homo sapiens
cgaacaggcaagttcaa

SEQ ID NO: 10990 - DNA, 23 bp, Homo sapiens
cgaacccagagcgacgctccggg

SEQ ID NO: 10991 - DNA, 14 bp, Homo sapiens
cgaacccggaagtt

SEQ ID NO: 10992 - DNA, 17 bp, Homo sapiens
cgaacgagcagtgaccg

SEQ ID NO: 10993 - DNA, 19 bp, Homo sapiens
cgaacggcagctaggaggg

SEQ ID NO: 10994 - DNA, 20 bp, Homo sapiens
cgaactgcgggtggactgtg

SEQ ID NO: 10995 - DNA, 19 bp, Homo sapiens
cgaagagaaccggtcgcgg

SEQ ID NO: 10996 - DNA, 17 bp, Homo sapiens
gtctagagggcggaggg

SEQ ID NO: 10997 - DNA, 17 bp, Homo sapiens
gtctagggctcagacgg

SEQ ID NO: 10998 - DNA, 18 bp, Homo sapiens
gtctaggtagctggcacc

SEQ ID NO: 10999 - DNA, 22 bp, Homo sapiens
gtctcagaggaggggacggcag

SEQ ID NO: 11000 - DNA, 18 bp, Homo sapiens
gtctccacccggactacg

SEQ ID NO: 11001 - DNA, 19 bp, Homo sapiens
gtctccacccggactacgc

SEQ ID NO: 11002 - DNA, 17 bp, Homo sapiens
gtctccagcgagcggcg

SEQ ID NO: 11003 - DNA, 20 bp, Homo sapiens
gtctcctcccggccggcgga

SEQ ID NO: 11004 - DNA, 20 bp, Homo sapiens
gtctcgcagtggggctgagg

SEQ ID NO: 11005 - DNA, 18 bp, Homo sapiens
gtctcgggaccgcaggta

SEQ ID NO: 11006 - DNA, 18 bp, Homo sapiens
gtctcggggctgcaggct

SEQ ID NO: 11007 - DNA, 18 bp, Homo sapiens
gtctctagaaccccagtg

SEQ ID NO: 11008 - DNA, 17 bp, Homo sapiens
gtctctagcagctgccg

SEQ ID NO: 11009 - DNA, 18 bp, Homo sapiens
gtctctagtagtgcagct

SEQ ID NO: 11010 - DNA, 18 bp, Homo sapiens
gtctctcggcggagctgc

SEQ ID NO: 11011 - DNA, 18 bp, Homo sapiens
gtctctgagcagccattg

SEQ ID NO: 11012 - DNA, 16 bp, Homo sapiens
gtctcttcgccggttc

SEQ ID NO: 11013 - DNA, 17 bp, Homo sapiens
gtctcttcgccggttcc

SEQ ID NO: 11014 - DNA, 21 bp, Homo sapiens
gtctgaagcggctgctgtagg

SEQ ID NO: 11015 - DNA, 18 bp, Homo sapiens
gtctgaagggggacaggt

SEQ ID NO: 11016 - DNA, 17 bp, Homo sapiens
gtctgaattgagaagcc

SEQ ID NO: 11017 - DNA, 17 bp, Homo sapiens
gtctgaggcgaagcttc

SEQ ID NO: 11018 - DNA, 20 bp, Homo sapiens
gtctgatgggccggtgggcg

SEQ ID NO: 11019 - DNA, 18 bp, Homo sapiens
gtctgcaggcactcggta

SEQ ID NO: 11020 - DNA, 17 bp, Homo sapiens
gtctgccagactataaa

SEQ ID NO: 11021 - DNA, 23 bp, Homo sapiens
gtctgccgccactgctgctgctg

SEQ ID NO: 11022 - DNA, 19 bp, Homo sapiens
gtctgccggactgacgggc

SEQ ID NO: 11023 - DNA, 18 bp, Homo sapiens
gtctgcgagctgccgtcc

SEQ ID NO: 11024 - DNA, 16 bp, Homo sapiens
gtctgcgccagacggg

SEQ ID NO: 11025 - DNA, 19 bp, Homo sapiens
gtctgctttggctgcccgg

SEQ ID NO: 11026 - DNA, 23 bp, Homo sapiens
gtctggacgtggaaagcaaggcg

SEQ ID NO: 11027 - DNA, 19 bp, Homo sapiens
gtctggctggcggcagcgg

SEQ ID NO: 11028 - DNA, 24 bp, Homo sapiens
gtctgggaggctccgggcgaagcc

SEQ ID NO: 11029 - DNA, 18 bp, Homo sapiens
gtctgggcactgcagcag

SEQ ID NO: 11030 - DNA, 18 bp, Homo sapiens
gtctggtagaggcaaagg

SEQ ID NO: 11031 - DNA, 19 bp, Homo sapiens
gtctgtatgatcttcggag

SEQ ID NO: 11032 - DNA, 18 bp, Homo sapiens
gtctgtcgcggctgaatc

SEQ ID NO: 11033 - DNA, 18 bp, Homo sapiens
gtctgtgatactgcagcg

SEQ ID NO: 11034 - DNA, 21 bp, Homo sapiens
gtctgtgtgtgagtgcaggca

SEQ ID NO: 11035 - DNA, 19 bp, Homo sapiens
gtcttaagcggcgcccagt

SEQ ID NO: 11036 - DNA, 18 bp, Homo sapiens
gtcttactgttgcgggct

SEQ ID NO: 11037 - DNA, 18 bp, Homo sapiens
gtcttagttggctactcg

SEQ ID NO: 11038 - DNA, 19 bp, Homo sapiens
gtcttcccgccacactcca

SEQ ID NO: 11039 - DNA, 17 bp, Homo sapiens
gtcttcctgtttcgtgt

SEQ ID NO: 11040 - DNA, 17 bp, Homo sapiens
gtcttcgcccgccatgg

SEQ ID NO: 11041 - DNA, 18 bp, Homo sapiens
gtctttgatcgtaaccag

SEQ ID NO: 11042 - DNA, 18 bp, Homo sapiens
gtctttgcgctcggacct

SEQ ID NO: 11043 - DNA, 19 bp, Homo sapiens
gtcttttctgtcttatctg

SEQ ID NO: 11044 - DNA, 18 bp, Homo sapiens
gtgaaatcgcgtggactg

SEQ ID NO: 11045 - DNA, 23 bp, Homo sapiens
gtgaaatcgtggcagccgcctcg

SEQ ID NO: 11046 - DNA, 18 bp, Homo sapiens
gtgaacatggcgtcctcg

SEQ ID NO: 11047 - DNA, 20 bp, Homo sapiens
gtgaacggagctttcgcagc

SEQ ID NO: 11048 - DNA, 19 bp, Homo sapiens
gtgaacggtgtggagcgga

SEQ ID NO: 11049 - DNA, 16 bp, Homo sapiens
gtgaagagcggaaggg

SEQ ID NO: 11050 - DNA, 18 bp, Homo sapiens
gtgaagcggcgaaggagg

SEQ ID NO: 11051 - DNA, 18 bp, Homo sapiens
gtgaagcggttgggaaag

SEQ ID NO: 11052 - DNA, 19 bp, Homo sapiens
gtgaaggagagagctgaag

SEQ ID NO: 11053 - DNA, 21 bp, Homo sapiens
cgaagaggtaaccgggtagca

SEQ ID NO: 11054 - DNA, 18 bp, Homo sapiens
cgaagatggccctggaga

SEQ ID NO: 11055 - DNA, 20 bp, Homo sapiens
cgaagatggcggcagtggag

SEQ ID NO: 11056 - DNA, 16 bp, Homo sapiens
cgaagcgccggctcgc

SEQ ID NO: 11057 - DNA, 18 bp, Homo sapiens
cgaagcggaagtgggttg

SEQ ID NO: 11058 - DNA, 17 bp, Homo sapiens
cgaagctagaggaccgg

SEQ ID NO: 11059 - DNA, 18 bp, Homo sapiens
cgaagctggcccaggagg

SEQ ID NO: 11060 - DNA, 15 bp, Homo sapiens
cgaaggactaagtgg

SEQ ID NO: 11061 - DNA, 20 bp, Homo sapiens
cgaagggaccaccgggaaca

SEQ ID NO: 11062 - DNA, 16 bp, Homo sapiens
cgaagggaggtgagcg

SEQ ID NO: 11063 - DNA, 22 bp, Homo sapiens
cgaagtctacgggggtctccaa

SEQ ID NO: 11064 - DNA, 20 bp, Homo sapiens
cgacaaaatggctgcccgag

SEQ ID NO: 11065 - DNA, 17 bp, Homo sapiens
cgacaagatggcggtga

SEQ ID NO: 11066 - DNA, 19 bp, Homo sapiens
cgacacgccggcgggcggc

SEQ ID NO: 11067 - DNA, 17 bp, Homo sapiens
cgacactctccaggctc

SEQ ID NO: 11068 - DNA, 18 bp, Homo sapiens
cgacactctccaggctcc

SEQ ID NO: 11069 - DNA, 19 bp, Homo sapiens
cgacacttccgcccctcac

SEQ ID NO: 11070 - DNA, 18 bp, Homo sapiens
cgacacttcgaacgcact

SEQ ID NO: 11071 - DNA, 20 bp, Homo sapiens
cgacacttcgaacgcacttg

SEQ ID NO: 11072 - DNA, 18 bp, Homo sapiens
cgacagaacgaggggacg

SEQ ID NO: 11073 - DNA, 18 bp, Homo sapiens
cgacagagccaaaatcag

SEQ ID NO: 11074 - DNA, 20 bp, Homo sapiens
cgacaggcgtgcccttgaca

SEQ ID NO: 11075 - DNA, 18 bp, Homo sapiens
cgacaggtaggggccgag

SEQ ID NO: 11076 - DNA, 17 bp, Homo sapiens
cgaccagaatccgtgaa

SEQ ID NO: 11077 - DNA, 19 bp, Homo sapiens
cgaccagaatccgtgaaca

SEQ ID NO: 11078 - DNA, 18 bp, Homo sapiens
cgaccatcggcggcaggc

SEQ ID NO: 11079 - DNA, 24 bp, Homo sapiens
cgacccgtggccttgtgtttcagg

SEQ ID NO: 11080 - DNA, 24 bp, Homo sapiens
cgaccgaactctggcggtggtggt

SEQ ID NO: 11081 - DNA, 18 bp, Homo sapiens
cgaccggctgaggcggcg

SEQ ID NO: 11082 - DNA, 17 bp, Homo sapiens
cgacctttatcccgcgc

SEQ ID NO: 11083 - DNA, 23 bp, Homo sapiens
cgacctttctctgcgcagtacgg

SEQ ID NO: 11084 - DNA, 15 bp, Homo sapiens
cgacgaggtggccga

SEQ ID NO: 11085 - DNA, 18 bp, Homo sapiens
cgacgatggagggagacg

SEQ ID NO: 11086 - DNA, 20 bp, Homo sapiens
cgacgcagcggttgggaaca

SEQ ID NO: 11087 - DNA, 18 bp, Homo sapiens
cgacgccgccgccttaga

SEQ ID NO: 11088 - DNA, 18 bp, Homo sapiens
cgacgccgctgccaccgc

SEQ ID NO: 11089 - DNA, 19 bp, Homo sapiens
cgacgccggccaagacagc

SEQ ID NO: 11090 - DNA, 18 bp, Homo sapiens
cgacgcggcgaaggagcg

SEQ ID NO: 11091 - DNA, 16 bp, Homo sapiens
cgacgcgggagccgca

SEQ ID NO: 11092 - DNA, 18 bp, Homo sapiens
cgacgctggcggtggacg

SEQ ID NO: 11093 - DNA, 18 bp, Homo sapiens
cgacggatagactggggg

SEQ ID NO: 11094 - DNA, 17 bp, Homo sapiens
cgacggcggcaggagcg

SEQ ID NO: 11095 - DNA, 21 bp, Homo sapiens
cgacgggcttcgggtcggtgc

SEQ ID NO: 11096 - DNA, 17 bp, Homo sapiens
cgactagccaagtgagg

SEQ ID NO: 11097 - DNA, 18 bp, Homo sapiens
cgactcaacgtgagacgc

SEQ ID NO: 11098 - DNA, 21 bp, Homo sapiens
cgactccggcaagagggtcag

SEQ ID NO: 11099 - DNA, 14 bp, Homo sapiens
cgactcttaccggt

SEQ ID NO: 11100 - DNA, 19 bp, Homo sapiens
cgactgaggcacgagcggg

SEQ ID NO: 11101 - DNA, 19 bp, Homo sapiens
cgactgaggggctcagagg

SEQ ID NO: 11102 - DNA, 23 bp, Homo sapiens
cgactgcgagccgtcggaccctg

SEQ ID NO: 11103 - DNA, 18 bp, Homo sapiens
cgactgctttcggcttgc

SEQ ID NO: 11104 - DNA, 18 bp, Homo sapiens
cgactgtgacgtgaggtg

SEQ ID NO: 11105 - DNA, 18 bp, Homo sapiens
cgactgtgagccaggaag

SEQ ID NO: 11106 - DNA, 16 bp, Homo sapiens
cgactgtgtagtccgc

SEQ ID NO: 11107 - DNA, 16 bp, Homo sapiens
cgacttcgatattaac

SEQ ID NO: 11108 - DNA, 16 bp, Homo sapiens
cgacttcgggggcggc

SEQ ID NO: 11109 - DNA, 18 bp, Homo sapiens
cgacttcttcaccatttt

SEQ ID NO: 11110 - DNA, 18 bp, Homo sapiens
gtgaattctagaggcggc

SEQ ID NO: 11111 - DNA, 21 bp, Homo sapiens
gtgaattgcaggacacattga

SEQ ID NO: 11112 - DNA, 22 bp, Homo sapiens
gtgaattgcaggacacattgat

SEQ ID NO: 11113 - DNA, 17 bp, Homo sapiens
gtgacacggaagtagct

SEQ ID NO: 11114 - DNA, 18 bp, Homo sapiens
gtgacagaagtgcgactg

SEQ ID NO: 11115 - DNA, 18 bp, Homo sapiens
gtgacagcctcgcttgga

SEQ ID NO: 11116 - DNA, 16 bp, Homo sapiens
gtgacagggaggggga

SEQ ID NO: 11117 - DNA, 18 bp, Homo sapiens
gtgacccagggagacaaa

SEQ ID NO: 11118 - DNA, 16 bp, Homo sapiens
gtgaccctcgggcctc

SEQ ID NO: 11119 - DNA, 18 bp, Homo sapiens
gtgacgggcaggaaacca

SEQ ID NO: 11120 - DNA, 18 bp, Homo sapiens
gtgactaagatggaagcg

SEQ ID NO: 11121 - DNA, 19 bp, Homo sapiens
gtgactaagatggaagcgt

SEQ ID NO: 11122 - DNA, 20 bp, Homo sapiens
gtgactgcagagcggctcgc

SEQ ID NO: 11123 - DNA, 18 bp, Homo sapiens
gtgagaaacggactggtg

SEQ ID NO: 11124 - DNA, 18 bp, Homo sapiens
gtgagaaattgagagggc

SEQ ID NO: 11125 - DNA, 17 bp, Homo sapiens
gtgagagagttggttgg

SEQ ID NO: 11126 - DNA, 19 bp, Homo sapiens
gtgagagagttggttggtg

SEQ ID NO: 11127 - DNA, 18 bp, Homo sapiens
gtgagaggcgcaggggat

SEQ ID NO: 11128 - DNA, 18 bp, Homo sapiens
gtgagagggctggcaggg

SEQ ID NO: 11129 - DNA, 23 bp, Homo sapiens
gtgagcagcggcccgaggctccc

SEQ ID NO: 11130 - DNA, 20 bp, Homo sapiens
gtgagccggaccgggggcag

SEQ ID NO: 11131 - DNA, 16 bp, Homo sapiens
gtgagcgagcggagga

SEQ ID NO: 11132 - DNA, 15 bp, Homo sapiens
gtgagcggaaaatgg

SEQ ID NO: 11133 - DNA, 17 bp, Homo sapiens
gtgagcggagcgcctgg

SEQ ID NO: 11134 - DNA, 18 bp, Homo sapiens
gtgagcggagtagcgagt

SEQ ID NO: 11135 - DNA, 17 bp, Homo sapiens
gtgagcgggaaggtagg

SEQ ID NO: 11136 - DNA, 18 bp, Homo sapiens
gtgagcgggaaggtaggt

SEQ ID NO: 11137 - DNA, 22 bp, Homo sapiens
gtgagcgggaaggtaggtaacg

SEQ ID NO: 11138 - DNA, 18 bp, Homo sapiens
gtgagctagcggattccc

SEQ ID NO: 11139 - DNA, 20 bp, Homo sapiens
gtgagctcccggcccgctgc

SEQ ID NO: 11140 - DNA, 18 bp, Homo sapiens
gtgagctcgctgagactt

SEQ ID NO: 11141 - DNA, 20 bp, Homo sapiens
gtgagctcgctttgcggcgt

SEQ ID NO: 11142 - DNA, 18 bp, Homo sapiens
gtgagctgcgcctgacgg

SEQ ID NO: 11143 - DNA, 18 bp, Homo sapiens
gtgagctggaaggtcttg

SEQ ID NO: 11144 - DNA, 17 bp, Homo sapiens
gtgagctgggctggctt

SEQ ID NO: 11145 - DNA, 17 bp, Homo sapiens
gtgaggaatggagccgg

SEQ ID NO: 11146 - DNA, 16 bp, Homo sapiens
gtgaggagctcggtcg

SEQ ID NO: 11147 - DNA, 18 bp, Homo sapiens
gtgaggccgaggtgactg

SEQ ID NO: 11148 - DNA, 20 bp, Homo sapiens
gtgaggcggagcgcgggcgg

SEQ ID NO: 11149 - DNA, 17 bp, Homo sapiens
gtgaggctgcgacgcgc

SEQ ID NO: 11150 - DNA, 18 bp, Homo sapiens
gtgaggcttggcgggccg

SEQ ID NO: 11151 - DNA, 23 bp, Homo sapiens
gtgagggctgcagttgcggcgac

SEQ ID NO: 11152 - DNA, 16 bp, Homo sapiens
gtgaggggtaacaaga

SEQ ID NO: 11153 - DNA, 19 bp, Homo sapiens
gtgagggtgtgcagcttgg

SEQ ID NO: 11154 - DNA, 17 bp, Homo sapiens
gtgaggtgagttcgagg

SEQ ID NO: 11155 - DNA, 22 bp, Homo sapiens
gtgagtagtggcgcgcggcggc

SEQ ID NO: 11156 - DNA, 19 bp, Homo sapiens
gtgagtatgggtggcggag

SEQ ID NO: 11157 - DNA, 18 bp, Homo sapiens
gtgagtcggcgcggcggg

SEQ ID NO: 11158 - DNA, 22 bp, Homo sapiens
gtgagtctcgcagtggggctga

SEQ ID NO: 11159 - DNA, 18 bp, Homo sapiens
gtgagtgagacgggcaga

SEQ ID NO: 11160 - DNA, 21 bp, Homo sapiens
gtgagtgagagagttggttgg

SEQ ID NO: 11161 - DNA, 24 bp, Homo sapiens
gtgagtgagcgcctctgatggaag

SEQ ID NO: 11162 - DNA, 20 bp, Homo sapiens
gtgagtgatccgggagttag

SEQ ID NO: 11163 - DNA, 18 bp, Homo sapiens
gtgagtgtctcgccggtg

SEQ ID NO: 11164 - DNA, 21 bp, Homo sapiens
gtgagtgtgacggctggaact

SEQ ID NO: 11165 - DNA, 20 bp, Homo sapiens
gtgagtgtggcatcctcggc

SEQ ID NO: 11166 - DNA, 18 bp, Homo sapiens
gtgaaggggcagaacagg

SEQ ID NO: 11167 - DNA, 17 bp, Homo sapiens
cgagacaaagggaagcg

SEQ ID NO: 11168 - DNA, 18 bp, Homo sapiens
cgagacaaagggaagcgc

SEQ ID NO: 11169 - DNA, 21 bp, Homo sapiens
cgagacaatggggatgtgggc

SEQ ID NO: 11170 - DNA, 21 bp, Homo sapiens
cgagaccgacacacactccca

SEQ ID NO: 11171 - DNA, 19 bp, Homo sapiens
cgagaccgcggcggagcct

SEQ ID NO: 11172 - DNA, 17 bp, Homo sapiens
cgagactagaagcgctg

SEQ ID NO: 11173 - DNA, 19 bp, Homo sapiens
cgagagcccgctccttgcc

SEQ ID NO: 11174 - DNA, 16 bp, Homo sapiens
cgagagctgcgaaggg

SEQ ID NO: 11175 - DNA, 18 bp, Homo sapiens
cgagaggaagatgaacag

SEQ ID NO: 11176 - DNA, 18 bp, Homo sapiens
cgagaggaggcggaggag

SEQ ID NO: 11177 - DNA, 18 bp, Homo sapiens
cgagaggatgaacaacaa

SEQ ID NO: 11178 - DNA, 17 bp, Homo sapiens
cgagcactggctacgtg

SEQ ID NO: 11179 - DNA, 19 bp, Homo sapiens
cgagcagaacgtgtagccg

SEQ ID NO: 11180 - DNA, 18 bp, Homo sapiens
cgagcccagctacgcgac

SEQ ID NO: 11181 - DNA, 19 bp, Homo sapiens
cgagcccagctacgcgacg

SEQ ID NO: 11182 - DNA, 18 bp, Homo sapiens
cgagcccccaggtagctc

SEQ ID NO: 11183 - DNA, 18 bp, Homo sapiens
cgagccgagccgagcgag

SEQ ID NO: 11184 - DNA, 22 bp, Homo sapiens
cgagccgggccgcggcgccgag

SEQ ID NO: 11185 - DNA, 19 bp, Homo sapiens
cgagccgggctacggggcg

SEQ ID NO: 11186 - DNA, 18 bp, Homo sapiens
cgagcctgaggtgaaaaa

SEQ ID NO: 11187 - DNA, 16 bp, Homo sapiens
cgagcctgcgttttcc

SEQ ID NO: 11188 - DNA, 18 bp, Homo sapiens
cgagcctgcgttttccgg

SEQ ID NO: 11189 - DNA, 19 bp, Homo sapiens
cgagcgcagcggagcctgg

SEQ ID NO: 11190 - DNA, 18 bp, Homo sapiens
cgagcgcgggacaaaggg

SEQ ID NO: 11191 - DNA, 16 bp, Homo sapiens
cgagcggagccgcggt

SEQ ID NO: 11192 - DNA, 22 bp, Homo sapiens
cgagcggcctctgaggagcagc

SEQ ID NO: 11193 - DNA, 18 bp, Homo sapiens
cgagcggggagggaggga

SEQ ID NO: 11194 - DNA, 20 bp, Homo sapiens
cgagcggggcgggaacgcgg

SEQ ID NO: 11195 - DNA, 24 bp, Homo sapiens
cgagcgggtgcgggtgcgggcgca

SEQ ID NO: 11196 - DNA, 17 bp, Homo sapiens
cgagctcgtcgtactga

SEQ ID NO: 11197 - DNA, 18 bp, Homo sapiens
cgagctctcgctggcctt

SEQ ID NO: 11198 - DNA, 17 bp, Homo sapiens
cgagctctgtggcgctg

SEQ ID NO: 11199 - DNA, 19 bp, Homo sapiens
cgagctgaggtgagggctg

SEQ ID NO: 11200 - DNA, 18 bp, Homo sapiens
cgagctgcgcggagggct

SEQ ID NO: 11201 - DNA, 22 bp, Homo sapiens
cgagctgcggcgggcgttggtc

SEQ ID NO: 11202 - DNA, 18 bp, Homo sapiens
cgagctggagctgaagcg

SEQ ID NO: 11203 - DNA, 18 bp, Homo sapiens
cgagctgggcaggacatg

SEQ ID NO: 11204 - DNA, 18 bp, Homo sapiens
cgagctgggttccaaggc

SEQ ID NO: 11205 - DNA, 19 bp, Homo sapiens
cgaggaaaatgcgggacgc

SEQ ID NO: 11206 - DNA, 22 bp, Homo sapiens
cgaggaaaatgcgggacgccca

SEQ ID NO: 11207 - DNA, 19 bp, Homo sapiens
cgaggacggctgttagtgc

SEQ ID NO: 11208 - DNA, 17 bp, Homo sapiens
cgaggacgtgctaacca

SEQ ID NO: 11209 - DNA, 18 bp, Homo sapiens
cgaggagacgctcgcgct

SEQ ID NO: 11210 - DNA, 21 bp, Homo sapiens
cgaggagaggaacaggaagag

SEQ ID NO: 11211 - DNA, 16 bp, Homo sapiens
cgaggatgtggtggcg

SEQ ID NO: 11212 - DNA, 18 bp, Homo sapiens
cgaggccagtagggagag

SEQ ID NO: 11213 - DNA, 18 bp, Homo sapiens
cgaggcccaggaagcacg

SEQ ID NO: 11214 - DNA, 18 bp, Homo sapiens
cgaggccctcggtcggac

SEQ ID NO: 11215 - DNA, 18 bp, Homo sapiens
cgaggccgcgggagcctg

SEQ ID NO: 11216 - DNA, 18 bp, Homo sapiens
cgaggccggaactggcgg

SEQ ID NO: 11217 - DNA, 17 bp, Homo sapiens
cgaggcgaccgctgagg

SEQ ID NO: 11218 - DNA, 18 bp, Homo sapiens
cgaggcggcggcagagac

SEQ ID NO: 11219 - DNA, 20 bp, Homo sapiens
cgaggcgtcgggagggccta

SEQ ID NO: 11220 - DNA, 18 bp, Homo sapiens
cgaggctgcaaaatggtt

SEQ ID NO: 11221 - DNA, 16 bp, Homo sapiens
cgaggctgcccgagct

SEQ ID NO: 11222 - DNA, 19 bp, Homo sapiens
cgaggctggggtagggagg

SEQ ID NO: 11223 - DNA, 16 bp, Homo sapiens
cgaggggtgcgcagca

SEQ ID NO: 11224 - DNA, 22 bp, Homo sapiens
gtgagtgttggcgggtggcggg

SEQ ID NO: 11225 - DNA, 19 bp, Homo sapiens
gtgagttcgaggtggcaga

SEQ ID NO: 11226 - DNA, 18 bp, Homo sapiens
gtgagttgctggcgctgg

SEQ ID NO: 11227 - DNA, 18 bp, Homo sapiens
gtgagttggggattgttg

SEQ ID NO: 11228 - DNA, 23 bp, Homo sapiens
gtgatacggagaacggaaaggag

SEQ ID NO: 11229 - DNA, 18 bp, Homo sapiens
gtgatcatggacgcttga

SEQ ID NO: 11230 - DNA, 18 bp, Homo sapiens
gtgatgaagggctggcag

SEQ ID NO: 11231 - DNA, 18 bp, Homo sapiens
gtgatggctgccggcgct

SEQ ID NO: 11232 - DNA, 19 bp, Homo sapiens
gtgcaatttaagtaaaaca

SEQ ID NO: 11233 - DNA, 19 bp, Homo sapiens
gtgcactgaagatggcggc

SEQ ID NO: 11234 - DNA, 18 bp, Homo sapiens
gtgcagaagttgtctgag

SEQ ID NO: 11235 - DNA, 18 bp, Homo sapiens
gtgcagacgcggctccta

SEQ ID NO: 11236 - DNA, 16 bp, Homo sapiens
gtgcagcgggacaggg

SEQ ID NO: 11237 - DNA, 19 bp, Homo sapiens
gtgcagcgggacagggcga

SEQ ID NO: 11238 - DNA, 19 bp, Homo sapiens
gtgcaggacgagaaacgcc

SEQ ID NO: 11239 - DNA, 18 bp, Homo sapiens
gtgcaggagcaggactta

SEQ ID NO: 11240 - DNA, 21 bp, Homo sapiens
gtgcaggaggagctctcggtc

SEQ ID NO: 11241 - DNA, 20 bp, Homo sapiens
gtgcaggctgcggatccccg

SEQ ID NO: 11242 - DNA, 18 bp, Homo sapiens
gtgcagggaagtggagta

SEQ ID NO: 11243 - DNA, 17 bp, Homo sapiens
gtgcagggccgttgagg

SEQ ID NO: 11244 - DNA, 22 bp, Homo sapiens
gtgcaggtaggaggcccgggcg

SEQ ID NO: 11245 - DNA, 16 bp, Homo sapiens
gtgcaggtcgaagagg

SEQ ID NO: 11246 - DNA, 17 bp, Homo sapiens
gtgcatccggcccggta

SEQ ID NO: 11247 - DNA, 20 bp, Homo sapiens
gtgcatgccgtgggtctgac

SEQ ID NO: 11248 - DNA, 17 bp, Homo sapiens
gtgcattctcgccgcgc

SEQ ID NO: 11249 - DNA, 19 bp, Homo sapiens
gtgccattcttaaaggcgc

SEQ ID NO: 11250 - DNA, 16 bp, Homo sapiens
gtgcccacaagttgcc

SEQ ID NO: 11251 - DNA, 21 bp, Homo sapiens
gtgcccacggaactggatgga

SEQ ID NO: 11252 - DNA, 17 bp, Homo sapiens
gtgcccatctatcagca

SEQ ID NO: 11253 - DNA, 21 bp, Homo sapiens
gtgcccgggcagggaagtcgg

SEQ ID NO: 11254 - DNA, 19 bp, Homo sapiens
gtgccgacgcagcggtgtt

SEQ ID NO: 11255 - DNA, 18 bp, Homo sapiens
gtgccgcaggttctctta

SEQ ID NO: 11256 - DNA, 16 bp, Homo sapiens
gtgccgctgtgccagg

SEQ ID NO: 11257 - DNA, 20 bp, Homo sapiens
gtgccgggagggtaggatgg

SEQ ID NO: 11258 - DNA, 14 bp, Homo sapiens
gtgccggtaacgcg

SEQ ID NO: 11259 - DNA, 18 bp, Homo sapiens
gtgccgtagtagcgggcc

SEQ ID NO: 11260 - DNA, 21 bp, Homo sapiens
gtgcctctgcttccggctcga

SEQ ID NO: 11261 - DNA, 22 bp, Homo sapiens
gtgcctgtctgtctattctagc

SEQ ID NO: 11262 - DNA, 18 bp, Homo sapiens
gtgcgacaggaggagctg

SEQ ID NO: 11263 - DNA, 19 bp, Homo sapiens
gtgcgactgggcggcctcg

SEQ ID NO: 11264 - DNA, 16 bp, Homo sapiens
gtgcgagcccggccgc

SEQ ID NO: 11265 - DNA, 15 bp, Homo sapiens
gtgcgagtaggcgct

SEQ ID NO: 11266 - DNA, 16 bp, Homo sapiens
gtgcgatgtggacaag

SEQ ID NO: 11267 - DNA, 18 bp, Homo sapiens
gtgcgatgtggacaagag

SEQ ID NO: 11268 - DNA, 19 bp, Homo sapiens
gtgcgatgtggacaagaga

SEQ ID NO: 11269 - DNA, 21 bp, Homo sapiens
gtgcgatgtggacaagagagg

SEQ ID NO: 11270 - DNA, 22 bp, Homo sapiens
gtgcgatgtggacaagagaggt

SEQ ID NO: 11271 - DNA, 17 bp, Homo sapiens
gtgcgcctggtcttcca

SEQ ID NO: 11272 - DNA, 16 bp, Homo sapiens
gtgcgcgacgcagtca

SEQ ID NO: 11273 - DNA, 19 bp, Homo sapiens
gtgcgcgcgctgggcctag

SEQ ID NO: 11274 - DNA, 19 bp, Homo sapiens
gtgcgcgcggtcggatcac

SEQ ID NO: 11275 - DNA, 17 bp, Homo sapiens
gtgcgcggcggagactg

SEQ ID NO: 11276 - DNA, 16 bp, Homo sapiens
gtgcgcggggcggacg

SEQ ID NO: 11277 - DNA, 21 bp, Homo sapiens
gtgcgcggtgagttccccggc

SEQ ID NO: 11278 - DNA, 18 bp, Homo sapiens
gtgcggagcaaggcggtg

SEQ ID NO: 11279 - DNA, 18 bp, Homo sapiens
gtgcggagcatttcggct

SEQ ID NO: 11280 - DNA, 18 bp, Homo sapiens
gtgcggagcgagtgggag

SEQ ID NO: 11281 - DNA, 18 bp, Homo sapiens
cgaggtcgcagaacagcc

SEQ ID NO: 11282 - DNA, 18 bp, Homo sapiens
cgaggtcttcttcaacag

SEQ ID NO: 11283 - DNA, 18 bp, Homo sapiens
cgaggtgagggacgatgg

SEQ ID NO: 11284 - DNA, 20 bp, Homo sapiens
cgagtaaaaccgccgcccgg

SEQ ID NO: 11285 - DNA, 16 bp, Homo sapiens
cgagtagcccctctac

SEQ ID NO: 11286 - DNA, 20 bp, Homo sapiens
cgagtaggcgcttgggcact

SEQ ID NO: 11287 - DNA, 19 bp, Homo sapiens
cgagtccagaagcagcccc

SEQ ID NO: 11288 - DNA, 20 bp, Homo sapiens
cgagtccatccgcggcgggg

SEQ ID NO: 11289 - DNA, 16 bp, Homo sapiens
cgagtcgcacggaggg

SEQ ID NO: 11290 - DNA, 19 bp, Homo sapiens
cgagtcggcaacccggagg

SEQ ID NO: 11291 - DNA, 18 bp, Homo sapiens
cgagtcggggcagagtcc

SEQ ID NO: 11292 - DNA, 17 bp, Homo sapiens
cgagtctttaggtctgc

SEQ ID NO: 11293 - DNA, 16 bp, Homo sapiens
cgagtgaggaaaggag

SEQ ID NO: 11294 - DNA, 18 bp, Homo sapiens
cgagtgccaggctgggcc

SEQ ID NO: 11295 - DNA, 20 bp, Homo sapiens
cgagtgcgtcgagctcgccg

SEQ ID NO: 11296 - DNA, 18 bp, Homo sapiens
cgagtggacaaaatggcg

SEQ ID NO: 11297 - DNA, 18 bp, Homo sapiens
cgagtggcgggccgactg

SEQ ID NO: 11298 - DNA, 20 bp, Homo sapiens
cgagtgtcgggcgcggcagg

SEQ ID NO: 11299 - DNA, 19 bp, Homo sapiens
cgagttagctcagccaggc

SEQ ID NO: 11300 - DNA, 17 bp, Homo sapiens
cgatagcggcgggagcg

SEQ ID NO: 11301 - DNA, 18 bp, Homo sapiens
cgatcagtcggtcctggg

SEQ ID NO: 11302 - DNA, 19 bp, Homo sapiens
cgatcagtcggtcctgggc

SEQ ID NO: 11303 - DNA, 20 bp, Homo sapiens
cgatcgaggctgcagcgcgg

SEQ ID NO: 11304 - DNA, 18 bp, Homo sapiens
cgatgaacctcgggggtg

SEQ ID NO: 11305 - DNA, 18 bp, Homo sapiens
cgatgcctgcccggctgt

SEQ ID NO: 11306 - DNA, 19 bp, Homo sapiens
cgatggagatggcggctgc

SEQ ID NO: 11307 - DNA, 18 bp, Homo sapiens
cgatggagcgggcaaggt

SEQ ID NO: 11308 - DNA, 17 bp, Homo sapiens
cgatggagggaggagga

SEQ ID NO: 11309 - DNA, 17 bp, Homo sapiens
cgatggcggcacaggga

SEQ ID NO: 11310 - DNA, 22 bp, Homo sapiens
cgatggcggcgggtggcagcga

SEQ ID NO: 11311 - DNA, 16 bp, Homo sapiens
cgatggtgttcggtct

SEQ ID NO: 11312 - DNA, 21 bp, Homo sapiens
cgatgttgcgcgaggaaaatg

SEQ ID NO: 11313 - DNA, 18 bp, Homo sapiens
cgattcctggcttttgca

SEQ ID NO: 11314 - DNA, 21 bp, Homo sapiens
cgattcggcgcggctcatggt

SEQ ID NO: 11315 - DNA, 18 bp, Homo sapiens
cgattgaggaagagcgag

SEQ ID NO: 11316 - DNA, 17 bp, Homo sapiens
cgattggtgcgtgcttt

SEQ ID NO: 11317 - DNA, 18 bp, Homo sapiens
cgatttagtctgaggcga

SEQ ID NO: 11318 - DNA, 19 bp, Homo sapiens
cgatttgtaggtaatggca

SEQ ID NO: 11319 - DNA, 18 bp, Homo sapiens
cgcaaagctgaggaaagg

SEQ ID NO: 11320 - DNA, 18 bp, Homo sapiens
cgcaacaggtcagggcta

SEQ ID NO: 11321 - DNA, 16 bp, Homo sapiens
cgcaaccaaatccgac

SEQ ID NO: 11322 - DNA, 17 bp, Homo sapiens
cgcaagagggcgctgcg

SEQ ID NO: 11323 - DNA, 18 bp, Homo sapiens
cgcaagcatggtaggact

SEQ ID NO: 11324 - DNA, 18 bp, Homo sapiens
cgcaagcgcataacccag

SEQ ID NO: 11325 - DNA, 16 bp, Homo sapiens
cgcaagggctcgagac

SEQ ID NO: 11326 - DNA, 17 bp, Homo sapiens
cgcacaactgctaaagc

SEQ ID NO: 11327 - DNA, 18 bp, Homo sapiens
cgcaccaccatgacccag

SEQ ID NO: 11328 - DNA, 18 bp, Homo sapiens
cgcaccggggaacaaggt

SEQ ID NO: 11329 - DNA, 17 bp, Homo sapiens
cgcacctgggagaaaca

SEQ ID NO: 11330 - DNA, 16 bp, Homo sapiens
cgcacgagcctcaaga

SEQ ID NO: 11331 - DNA, 21 bp, Homo sapiens
cgcacgatggccggcgccgcg

SEQ ID NO: 11332 - DNA, 18 bp, Homo sapiens
cgcacgcagccagcgagc

SEQ ID NO: 11333 - DNA, 16 bp, Homo sapiens
cgcacggacagagcgg

SEQ ID NO: 11334 - DNA, 18 bp, Homo sapiens
cgcacggatgagctcggc

SEQ ID NO: 11335 - DNA, 20 bp, Homo sapiens
cgcagaacttggggagccgc

SEQ ID NO: 11336 - DNA, 22 bp, Homo sapiens
cgcagaacttggggagccgccg

SEQ ID NO: 11337 - DNA, 18 bp, Homo sapiens
cgcagagcactggcactg

SEQ ID NO: 11338 - DNA, 19 bp, Homo sapiens
gtgcggagcgagtgggagc

SEQ ID NO: 11339 - DNA, 18 bp, Homo sapiens
gtgcggagggagttgggg

SEQ ID NO: 11340 - DNA, 19 bp, Homo sapiens
gtgcggcctccgggctgcc

SEQ ID NO: 11341 - DNA, 18 bp, Homo sapiens
gtgcggcgaacaccaaag

SEQ ID NO: 11342 - DNA, 20 bp, Homo sapiens
gtgcggcgcctgggtcccca

SEQ ID NO: 11343 - DNA, 16 bp, Homo sapiens
gtgcggcggatcccag

SEQ ID NO: 11344 - DNA, 19 bp, Homo sapiens
gtgcgggaaatggctttaa

SEQ ID NO: 11345 - DNA, 20 bp, Homo sapiens
gtgcgggattgggcgggctg

SEQ ID NO: 11346 - DNA, 18 bp, Homo sapiens
gtgcgggcgagaagatgg

SEQ ID NO: 11347 - DNA, 17 bp, Homo sapiens
gtgcgggctgggcacaa

SEQ ID NO: 11348 - DNA, 16 bp, Homo sapiens
gtgcggggcggaacgc

SEQ ID NO: 11349 - DNA, 18 bp, Homo sapiens
gtgcggtaacaccgttca

SEQ ID NO: 11350 - DNA, 18 bp, Homo sapiens
gtgcggtgaagggaggat

SEQ ID NO: 11351 - DNA, 22 bp, Homo sapiens
gtgcggtgaggcgcgcagatca

SEQ ID NO: 11352 - DNA, 20 bp, Homo sapiens
gtgcgtggagattaggtcca

SEQ ID NO: 11353 - DNA, 18 bp, Homo sapiens
gtgcgttctcgttctagc

SEQ ID NO: 11354 - DNA, 19 bp, Homo sapiens
gtgcgtttagggcgaagac

SEQ ID NO: 11355 - DNA, 21 bp, Homo sapiens
gtgcgtttagggcgaagacgg

SEQ ID NO: 11356 - DNA, 18 bp, Homo sapiens
gtgctatgaccggacttt

SEQ ID NO: 11357 - DNA, 19 bp, Homo sapiens
gtgctcagagtgtggtcag

SEQ ID NO: 11358 - DNA, 21 bp, Homo sapiens
gtgctcagagtgtggtcaggc

SEQ ID NO: 11359 - DNA, 20 bp, Homo sapiens
gtgctcctccgagctcgctg

SEQ ID NO: 11360 - DNA, 18 bp, Homo sapiens
gtgctcggaaaatggcct

SEQ ID NO: 11361 - DNA, 21 bp, Homo sapiens
gtgctcggaaaatggccttgt

SEQ ID NO: 11362 - DNA, 15 bp, Homo sapiens
gtgctcggaggacgc

SEQ ID NO: 11363 - DNA, 20 bp, Homo sapiens
gtgctcgtcgggcgcgcgtg

SEQ ID NO: 11364 - DNA, 17 bp, Homo sapiens
gtgctgaggcggaacag

SEQ ID NO: 11365 - DNA, 19 bp, Homo sapiens
gtgctgaggcggaacaggc

SEQ ID NO: 11366 - DNA, 17 bp, Homo sapiens
gtgctggagctatacag

SEQ ID NO: 11367 - DNA, 17 bp, Homo sapiens
gtgctgggcctggctcg

SEQ ID NO: 11368 - DNA, 16 bp, Homo sapiens
gtgctgggggcgactc

SEQ ID NO: 11369 - DNA, 18 bp, Homo sapiens
gtgctgtgggcgcagcgc

SEQ ID NO: 11370 - DNA, 18 bp, Homo sapiens
gtgctgtggtcccaaggc

SEQ ID NO: 11371 - DNA, 19 bp, Homo sapiens
gtgctgtggtcccaaggcg

SEQ ID NO: 11372 - DNA, 16 bp, Homo sapiens
gtgcttagttttgctg

SEQ ID NO: 11373 - DNA, 18 bp, Homo sapiens
gtgcttccggtgcggagg

SEQ ID NO: 11374 - DNA, 16 bp, Homo sapiens
gtgcttttgggaacgc

SEQ ID NO: 11375 - DNA, 20 bp, Homo sapiens
gtggaaagaggagaagggcg

SEQ ID NO: 11376 - DNA, 16 bp, Homo sapiens
gtggaaagcggggctg

SEQ ID NO: 11377 - DNA, 17 bp, Homo sapiens
gtggaaaggcgagagcg

SEQ ID NO: 11378 - DNA, 21 bp, Homo sapiens
gtggaaatgggcaacggcggg

SEQ ID NO: 11379 - DNA, 20 bp, Homo sapiens
gtggaagaaacgcggaacca

SEQ ID NO: 11380 - DNA, 21 bp, Homo sapiens
gtggaagaccaggcagcccag

SEQ ID NO: 11381 - DNA, 18 bp, Homo sapiens
gtggaaggtggtggctgc

SEQ ID NO: 11382 - DNA, 18 bp, Homo sapiens
gtggaagttgctggctga

SEQ ID NO: 11383 - DNA, 16 bp, Homo sapiens
gtggaattcgccgttc

SEQ ID NO: 11384 - DNA, 16 bp, Homo sapiens
gtggacaagagaggtc

SEQ ID NO: 11385 - DNA, 18 bp, Homo sapiens
gtggacaagtggcgtgtg

SEQ ID NO: 11386 - DNA, 16 bp, Homo sapiens
gtggacatcttgtcgg

SEQ ID NO: 11387 - DNA, 16 bp, Homo sapiens
gtggacctgggacggg

SEQ ID NO: 11388 - DNA, 18 bp, Homo sapiens
gtggacgccgagcctctc

SEQ ID NO: 11389 - DNA, 18 bp, Homo sapiens
gtggacgccgggtgagtg

SEQ ID NO: 11390 - DNA, 18 bp, Homo sapiens
gtggacgcgtctgggctg

SEQ ID NO: 11391 - DNA, 18 bp, Homo sapiens
gtggacgtggttggtgat

SEQ ID NO: 11392 - DNA, 21 bp, Homo sapiens
gtggactgcaacacccagcag

SEQ ID NO: 11393 - DNA, 18 bp, Homo sapiens
gtggactggaggaaaggc

SEQ ID NO: 11394 - DNA, 18 bp, Homo sapiens
gtggagaccggagaagct

SEQ ID NO: 11395 - DNA, 17 bp, Homo sapiens
cgcagaggaagatggcg

SEQ ID NO: 11396 - DNA, 17 bp, Homo sapiens
cgcagagggctggtggt

SEQ ID NO: 11397 - DNA, 18 bp, Homo sapiens
cgcagagtttgggcgcca

SEQ ID NO: 11398 - DNA, 19 bp, Homo sapiens
cgcagcccaggccgccgcg

SEQ ID NO: 11399 - DNA, 20 bp, Homo sapiens
cgcagccgccacattcaaca

SEQ ID NO: 11400 - DNA, 18 bp, Homo sapiens
cgcagccgccaccaccaa

SEQ ID NO: 11401 - DNA, 18 bp, Homo sapiens
cgcagccgtcatggcagc

SEQ ID NO: 11402 - DNA, 16 bp, Homo sapiens
cgcagcgagcagcagt

SEQ ID NO: 11403 - DNA, 22 bp, Homo sapiens
cgcagcgccatgcgcagactca

SEQ ID NO: 11404 - DNA, 21 bp, Homo sapiens
cgcagcgctcactcgctcgca

SEQ ID NO: 11405 - DNA, 18 bp, Homo sapiens
cgcagcggttgggaacac

SEQ ID NO: 11406 - DNA, 23 bp, Homo sapiens
cgcagctagaccgcggggtagtc

SEQ ID NO: 11407 - DNA, 21 bp, Homo sapiens
cgcagctgcagtctgggagtc

SEQ ID NO: 11408 - DNA, 20 bp, Homo sapiens
cgcagctgtggccggagagg

SEQ ID NO: 11409 - DNA, 18 bp, Homo sapiens
cgcagcttgcaggcgccg

SEQ ID NO: 11410 - DNA, 19 bp, Homo sapiens
cgcaggacgcgacggctgc

SEQ ID NO: 11411 - DNA, 18 bp, Homo sapiens
cgcaggagagttctgggg

SEQ ID NO: 11412 - DNA, 20 bp, Homo sapiens
cgcaggaggagagagaaacg

SEQ ID NO: 11413 - DNA, 21 bp, Homo sapiens
cgcaggaggagagagaaacgc

SEQ ID NO: 11414 - DNA, 24 bp, Homo sapiens
cgcaggagggggtcatgggtaaag

SEQ ID NO: 11415 - DNA, 19 bp, Homo sapiens
cgcaggccgggaacacgag

SEQ ID NO: 11416 - DNA, 16 bp, Homo sapiens
cgcaggcgagtaggtg

SEQ ID NO: 11417 - DNA, 17 bp, Homo sapiens
cgcaggcggcagggctg

SEQ ID NO: 11418 - DNA, 20 bp, Homo sapiens
cgcaggcgtggggctctctc

SEQ ID NO: 11419 - DNA, 18 bp, Homo sapiens
cgcagggaccggtgagtg

SEQ ID NO: 11420 - DNA, 18 bp, Homo sapiens
cgcagggcacccggagga

SEQ ID NO: 11421 - DNA, 18 bp, Homo sapiens
cgcaggggctggactggc

SEQ ID NO: 11422 - DNA, 20 bp, Homo sapiens
cgcaggtactgccggaaagg

SEQ ID NO: 11423 - DNA, 18 bp, Homo sapiens
cgcagtcccagcgccacc

SEQ ID NO: 11424 - DNA, 18 bp, Homo sapiens
cgcagtcggcaaggagag

SEQ ID NO: 11425 - DNA, 16 bp, Homo sapiens
cgcagtcggccctcgg

SEQ ID NO: 11426 - DNA, 16 bp, Homo sapiens
cgcagtcgtggactcg

SEQ ID NO: 11427 - DNA, 19 bp, Homo sapiens
cgcagtctggttggagctg

SEQ ID NO: 11428 - DNA, 18 bp, Homo sapiens
cgcagtgaccgaaggctc

SEQ ID NO: 11429 - DNA, 17 bp, Homo sapiens
cgcagtggtttgtttgc

SEQ ID NO: 11430 - DNA, 19 bp, Homo sapiens
cgcagtgtcgggaagatgg

SEQ ID NO: 11431 - DNA, 16 bp, Homo sapiens
cgcagtgttgggactg

SEQ ID NO: 11432 - DNA, 18 bp, Homo sapiens
cgcagttccggtggctgg

SEQ ID NO: 11433 - DNA, 21 bp, Homo sapiens
cgcagttcgggaacatgttgg

SEQ ID NO: 11434 - DNA, 21 bp, Homo sapiens
cgcagttgtcgtctcttgcgg

SEQ ID NO: 11435 - DNA, 17 bp, Homo sapiens
cgcagtttgaatcgcgg

SEQ ID NO: 11436 - DNA, 19 bp, Homo sapiens
cgcagtttgaatcgcggtg

SEQ ID NO: 11437 - DNA, 18 bp, Homo sapiens
cgcatctcggcggcggcg

SEQ ID NO: 11438 - DNA, 22 bp, Homo sapiens
cgcattaaccctggagcgtccc

SEQ ID NO: 11439 - DNA, 19 bp, Homo sapiens
cgcattgccgctcccagtc

SEQ ID NO: 11440 - DNA, 19 bp, Homo sapiens
cgcattgccgtttttgctc

SEQ ID NO: 11441 - DNA, 20 bp, Homo sapiens
cgcatttccgcctctggcga

SEQ ID NO: 11442 - DNA, 20 bp, Homo sapiens
cgccaaacccgttttcttcc

SEQ ID NO: 11443 - DNA, 20 bp, Homo sapiens
cgccacgcccgagtcccagg

SEQ ID NO: 11444 - DNA, 23 bp, Homo sapiens
cgccacttctcacttccgcttcc

SEQ ID NO: 11445 - DNA, 18 bp, Homo sapiens
cgccacttgattctggag

SEQ ID NO: 11446 - DNA, 20 bp, Homo sapiens
cgccagcagcgccgcggcgg

SEQ ID NO: 11447 - DNA, 22 bp, Homo sapiens
cgccagggcctggtcggacgga

SEQ ID NO: 11448 - DNA, 20 bp, Homo sapiens
cgccagttggccgggcacgg

SEQ ID NO: 11449 - DNA, 18 bp, Homo sapiens
cgccatcgtcgtggggct

SEQ ID NO: 11450 - DNA, 17 bp, Homo sapiens
cgccatgcccgacccgg

SEQ ID NO: 11451 - DNA, 20 bp, Homo sapiens
cgccatgcggaacttggggg

SEQ ID NO: 11452 - DNA, 19 bp, Homo sapiens
gtggagaccggagaagctg

SEQ ID NO: 11453 - DNA, 17 bp, Homo sapiens
gtggagactagtgactg

SEQ ID NO: 11454 - DNA, 23 bp, Homo sapiens
gtggagagagcgagctgagtggt

SEQ ID NO: 11455 - DNA, 19 bp, Homo sapiens
gtggagagattgaagatgg

SEQ ID NO: 11456 - DNA, 17 bp, Homo sapiens
gtggagcgcagagcggg

SEQ ID NO: 11457 - DNA, 22 bp, Homo sapiens
gtggagcgctgcggagggtgcg

SEQ ID NO: 11458 - DNA, 18 bp, Homo sapiens
gtggagcggaggccgcgg

SEQ ID NO: 11459 - DNA, 18 bp, Homo sapiens
gtggagctgggcgtgctg

SEQ ID NO: 11460 - DNA, 22 bp, Homo sapiens
gtggaggaaatgcggagccgcg

SEQ ID NO: 11461 - DNA, 22 bp, Homo sapiens
gtggaggaggagaacatccgcg

SEQ ID NO: 11462 - DNA, 18 bp, Homo sapiens
gtggaggcctagagccct

SEQ ID NO: 11463 - DNA, 18 bp, Homo sapiens
gtggagggtggaacgcgg

SEQ ID NO: 11464 - DNA, 20 bp, Homo sapiens
gtggagggtggaacgcgggc

SEQ ID NO: 11465 - DNA, 18 bp, Homo sapiens
gtggaggtggactgggga

SEQ ID NO: 11466 - DNA, 19 bp, Homo sapiens
gtggagtcggttggacgcg

SEQ ID NO: 11467 - DNA, 20 bp, Homo sapiens
gtggagtcggttggacgcgc

SEQ ID NO: 11468 - DNA, 16 bp, Homo sapiens
gtggagtctggagacg

SEQ ID NO: 11469 - DNA, 17 bp, Homo sapiens
gtggagtgcagagggag

SEQ ID NO: 11470 - DNA, 18 bp, Homo sapiens
gtggagtgcagagggagc

SEQ ID NO: 11471 - DNA, 19 bp, Homo sapiens
gtggagtggcgtagacgag

SEQ ID NO: 11472 - DNA, 16 bp, Homo sapiens
gtggatggcgggaatt

SEQ ID NO: 11473 - DNA, 18 bp, Homo sapiens
gtggatggcgtggagata

SEQ ID NO: 11474 - DNA, 18 bp, Homo sapiens
gtggattcccagggactg

SEQ ID NO: 11475 - DNA, 18 bp, Homo sapiens
gtggcaagatggcgtccc

SEQ ID NO: 11476 - DNA, 21 bp, Homo sapiens
gtggcagaggtgcttgtgttt

SEQ ID NO: 11477 - DNA, 18 bp, Homo sapiens
gtggcagcggccatggac

SEQ ID NO: 11478 - DNA, 18 bp, Homo sapiens
gtggccaggcccagccgc

SEQ ID NO: 11479 - DNA, 19 bp, Homo sapiens
gtggccatggaggccgtgc

SEQ ID NO: 11480 - DNA, 17 bp, Homo sapiens
gtggcccctcgcgcggg

SEQ ID NO: 11481 - DNA, 17 bp, Homo sapiens
gtggcccgcgggccgac

SEQ ID NO: 11482 - DNA, 18 bp, Homo sapiens
gtggcccggagcgggggg

SEQ ID NO: 11483 - DNA, 20 bp, Homo sapiens
gtggccgaagcagggggaca

SEQ ID NO: 11484 - DNA, 22 bp, Homo sapiens
gtggccgcgggtgggcggaact

SEQ ID NO: 11485 - DNA, 19 bp, Homo sapiens
gtggccgctgcctctaccc

SEQ ID NO: 11486 - DNA, 22 bp, Homo sapiens
gtggccggagcagaggccccac

SEQ ID NO: 11487 - DNA, 17 bp, Homo sapiens
gtggccggtacgagctg

SEQ ID NO: 11488 - DNA, 18 bp, Homo sapiens
gtggccggtacgagctgc

SEQ ID NO: 11489 - DNA, 19 bp, Homo sapiens
gtggccggtgggggacctg

SEQ ID NO: 11490 - DNA, 20 bp, Homo sapiens
gtggccgtagcctcttccgg

SEQ ID NO: 11491 - DNA, 20 bp, Homo sapiens
gtggcgaaggggaggcgccg

SEQ ID NO: 11492 - DNA, 17 bp, Homo sapiens
gtggcgaccggtgagga

SEQ ID NO: 11493 - DNA, 17 bp, Homo sapiens
gtggcgactgagtgaga

SEQ ID NO: 11494 - DNA, 17 bp, Homo sapiens
gtggcgagcctgaggcg

SEQ ID NO: 11495 - DNA, 21 bp, Homo sapiens
gtggcgagcctgaggcgaaca

SEQ ID NO: 11496 - DNA, 18 bp, Homo sapiens
gtggcgagtgccggccga

SEQ ID NO: 11497 - DNA, 18 bp, Homo sapiens
gtggcgcaggtgaggaca

SEQ ID NO: 11498 - DNA, 24 bp, Homo sapiens
gtggcgcatcaggacgcggctgtc

SEQ ID NO: 11499 - DNA, 19 bp, Homo sapiens
gtggcgcccgagtgcactg

SEQ ID NO: 11500 - DNA, 19 bp, Homo sapiens
gtggcgcctcggaggcgtt

SEQ ID NO: 11501 - DNA, 17 bp, Homo sapiens
gtggcggaggctacgaa

SEQ ID NO: 11502 - DNA, 18 bp, Homo sapiens
gtggcggcggcggcggac

SEQ ID NO: 11503 - DNA, 19 bp, Homo sapiens
gtggcggcggcggcggacc

SEQ ID NO: 11504 - DNA, 18 bp, Homo sapiens
gtggcggcggcgggggtg

SEQ ID NO: 11505 - DNA, 19 bp, Homo sapiens
gtggcgtagacgagttaag

SEQ ID NO: 11506 - DNA, 15 bp, Homo sapiens
gtggcgtcccggcag

SEQ ID NO: 11507 - DNA, 18 bp, Homo sapiens
gtggcgtcgtaacgcctc

SEQ ID NO: 11508 - DNA, 20 bp, Homo sapiens
gtggctaggcgttccgcctc

SEQ ID NO: 11509 - DNA, 18 bp, Homo sapiens
cgccatggacgcggacga

SEQ ID NO: 11510 - DNA, 18 bp, Homo sapiens
cgccatttccagcggttg

SEQ ID NO: 11511 - DNA, 20 bp, Homo sapiens
cgccatttcgtggacgccgg

SEQ ID NO: 11512 - DNA, 20 bp, Homo sapiens
cgccattttgcgggaagagg

SEQ ID NO: 11513 - DNA, 18 bp, Homo sapiens
cgcccacacggtccgtct

SEQ ID NO: 11514 - DNA, 17 bp, Homo sapiens
cgcccagaggctgctga

SEQ ID NO: 11515 - DNA, 20 bp, Homo sapiens
cgcccagaggctgctgaggc

SEQ ID NO: 11516 - DNA, 18 bp, Homo sapiens
cgcccagcgagttccaga

SEQ ID NO: 11517 - DNA, 22 bp, Homo sapiens
cgcccaggcacaggagactcac

SEQ ID NO: 11518 - DNA, 17 bp, Homo sapiens
cgcccaggggctctact

SEQ ID NO: 11519 - DNA, 18 bp, Homo sapiens
cgcccatcgcccctgcgc

SEQ ID NO: 11520 - DNA, 16 bp, Homo sapiens
cgcccccgacgccatt

SEQ ID NO: 11521 - DNA, 20 bp, Homo sapiens
cgccccctgcaggcagcgcg

SEQ ID NO: 11522 - DNA, 17 bp, Homo sapiens
cgccccgaaccgccccg

SEQ ID NO: 11523 - DNA, 18 bp, Homo sapiens
cgccccggcagtaactta

SEQ ID NO: 11524 - DNA, 17 bp, Homo sapiens
cgcccgccatggccgag

SEQ ID NO: 11525 - DNA, 18 bp, Homo sapiens
cgcccgcggcggccgtgg

SEQ ID NO: 11526 - DNA, 19 bp, Homo sapiens
cgcccggggcaggagggca

SEQ ID NO: 11527 - DNA, 22 bp, Homo sapiens
cgcccggtgctgctgagcaaga

SEQ ID NO: 11528 - DNA, 21 bp, Homo sapiens
cgcccgtcgcggactcgtcct

SEQ ID NO: 11529 - DNA, 20 bp, Homo sapiens
cgccctaccggacacgaccc

SEQ ID NO: 11530 - DNA, 18 bp, Homo sapiens
cgccctcggagagctctg

SEQ ID NO: 11531 - DNA, 18 bp, Homo sapiens
cgccctgtggtgacagct

SEQ ID NO: 11532 - DNA, 16 bp, Homo sapiens
cgcccttcagtatcgc

SEQ ID NO: 11533 - DNA, 17 bp, Homo sapiens
cgcccttctccaggctc

SEQ ID NO: 11534 - DNA, 15 bp, Homo sapiens
cgccgaagcgtcgga

SEQ ID NO: 11535 - DNA, 16 bp, Homo sapiens
cgccgaagcgtcggac

SEQ ID NO: 11536 - DNA, 17 bp, Homo sapiens
cgccgaagcgtcggact

SEQ ID NO: 11537 - DNA, 18 bp, Homo sapiens
cgccgaagcgtcggacta

SEQ ID NO: 11538 - DNA, 19 bp, Homo sapiens
cgccgaagcgtcggactac

SEQ ID NO: 11539 - DNA, 23 bp, Homo sapiens
cgccgaccacgcttgatccccgg

SEQ ID NO: 11540 - DNA, 18 bp, Homo sapiens
cgccgagaccgcgtccgc

SEQ ID NO: 11541 - DNA, 23 bp, Homo sapiens
cgccgagagcgcggccgggacgg

SEQ ID NO: 11542 - DNA, 22 bp, Homo sapiens
cgccgagcccagctacgcgacg

SEQ ID NO: 11543 - DNA, 19 bp, Homo sapiens
cgccgagcgctctcactcg

SEQ ID NO: 11544 - DNA, 20 bp, Homo sapiens
cgccgagggaccggtgggcg

SEQ ID NO: 11545 - DNA, 18 bp, Homo sapiens
cgccgagtccctgacctg

SEQ ID NO: 11546 - DNA, 18 bp, Homo sapiens
cgccgagtcgcaggtacc

SEQ ID NO: 11547 - DNA, 17 bp, Homo sapiens
cgccgagtgtcgggcgc

SEQ ID NO: 11548 - DNA, 18 bp, Homo sapiens
cgccgagttccagcagtc

SEQ ID NO: 11549 - DNA, 19 bp, Homo sapiens
cgccgattcctggcttttg

SEQ ID NO: 11550 - DNA, 16 bp, Homo sapiens
cgccgcaatgcaggtg

SEQ ID NO: 11551 - DNA, 21 bp, Homo sapiens
cgccgccaccaccgcctctgc

SEQ ID NO: 11552 - DNA, 18 bp, Homo sapiens
cgccgccaccatgagcgg

SEQ ID NO: 11553 - DNA, 23 bp, Homo sapiens
cgccgccagcagagcgcaccggg

SEQ ID NO: 11554 - DNA, 18 bp, Homo sapiens
cgccgccgagccagctgc

SEQ ID NO: 11555 - DNA, 22 bp, Homo sapiens
cgccgccgagccgagaaagagg

SEQ ID NO: 11556 - DNA, 17 bp, Homo sapiens
cgccgccgccagatcgg

SEQ ID NO: 11557 - DNA, 19 bp, Homo sapiens
cgccgccgccccccccacc

SEQ ID NO: 11558 - DNA, 20 bp, Homo sapiens
cgccgccgctgccggacgcg

SEQ ID NO: 11559 - DNA, 23 bp, Homo sapiens
cgccgccggcgcggaaggacgag

SEQ ID NO: 11560 - DNA, 21 bp, Homo sapiens
cgccgccttctcacactttca

SEQ ID NO: 11561 - DNA, 18 bp, Homo sapiens
cgccgcctttctccgctg

SEQ ID NO: 11562 - DNA, 18 bp, Homo sapiens
cgccgcgcacctcatggt

SEQ ID NO: 11563 - DNA, 18 bp, Homo sapiens
cgccgcgcgggacccgga

SEQ ID NO: 11564 - DNA, 20 bp, Homo sapiens
cgccgcgcgtgtggcagtcg

SEQ ID NO: 11565 - DNA, 18 bp, Homo sapiens
cgccgcggagctggaccg

SEQ ID NO: 11566 - DNA, 21 bp, Homo sapiens
gtggctcccggggcgtttgag

SEQ ID NO: 11567 - DNA, 20 bp, Homo sapiens
gtggctgagagcagacaggt

SEQ ID NO: 11568 - DNA, 18 bp, Homo sapiens
gtggctgaggcggctggg

SEQ ID NO: 11569 - DNA, 20 bp, Homo sapiens
gtggctgaggcggctgggcc

SEQ ID NO: 11570 - DNA, 20 bp, Homo sapiens
gtggctgcctctggagcagg

SEQ ID NO: 11571 - DNA, 18 bp, Homo sapiens
gtggctgcgccgggctgc

SEQ ID NO: 11572 - DNA, 17 bp, Homo sapiens
gtggctggagaaagcgg

SEQ ID NO: 11573 - DNA, 21 bp, Homo sapiens
gtggctggagtccgggcagag

SEQ ID NO: 11574 - DNA, 16 bp, Homo sapiens
gtggctggccccacgc

SEQ ID NO: 11575 - DNA, 20 bp, Homo sapiens
gtggctggcgttggtccgaa

SEQ ID NO: 11576 - DNA, 19 bp, Homo sapiens
gtggctgggaggcagcggc

SEQ ID NO: 11577 - DNA, 19 bp, Homo sapiens
gtggcttcgtttacagttc

SEQ ID NO: 11578 - DNA, 20 bp, Homo sapiens
gtggcttgagctgtaggcgc

SEQ ID NO: 11579 - DNA, 18 bp, Homo sapiens
gtgggaaggcagctgaac

SEQ ID NO: 11580 - DNA, 16 bp, Homo sapiens
gtgggaagtaggtcgc

SEQ ID NO: 11581 - DNA, 17 bp, Homo sapiens
gtgggaccggtgtctgg

SEQ ID NO: 11582 - DNA, 18 bp, Homo sapiens
gtgggacgcggctgagac

SEQ ID NO: 11583 - DNA, 17 bp, Homo sapiens
gtgggacgtggtggtag

SEQ ID NO: 11584 - DNA, 18 bp, Homo sapiens
gtgggacgtggtggtagc

SEQ ID NO: 11585 - DNA, 18 bp, Homo sapiens
gtgggactcgcgtcgcgg

SEQ ID NO: 11586 - DNA, 16 bp, Homo sapiens
gtgggagacatggtgc

SEQ ID NO: 11587 - DNA, 18 bp, Homo sapiens
gtgggaggcgacactgag

SEQ ID NO: 11588 - DNA, 18 bp, Homo sapiens
gtgggaggcgccggggtg

SEQ ID NO: 11589 - DNA, 24 bp, Homo sapiens
gtgggccagcttcttccttttacc

SEQ ID NO: 11590 - DNA, 18 bp, Homo sapiens
gtgggcgcgagagggctg

SEQ ID NO: 11591 - DNA, 18 bp, Homo sapiens
gtgggcgcggactcggtg

SEQ ID NO: 11592 - DNA, 16 bp, Homo sapiens
gtgggcggcagctgcg

SEQ ID NO: 11593 - DNA, 18 bp, Homo sapiens
gtgggcggcggcgacgcc

SEQ ID NO: 11594 - DNA, 19 bp, Homo sapiens
gtgggcggtaactcgcagg

SEQ ID NO: 11595 - DNA, 18 bp, Homo sapiens
gtgggctgtgtttgaggc

SEQ ID NO: 11596 - DNA, 21 bp, Homo sapiens
gtgggctgtgtttgaggccgg

SEQ ID NO: 11597 - DNA, 21 bp, Homo sapiens
gtggggaaggaacagcaggcg

SEQ ID NO: 11598 - DNA, 19 bp, Homo sapiens
gtggggccgcgtgcgaagc

SEQ ID NO: 11599 - DNA, 18 bp, Homo sapiens
gtggggcttctttcccgt

SEQ ID NO: 11600 - DNA, 18 bp, Homo sapiens
gtggggcttgaggccgag

SEQ ID NO: 11601 - DNA, 18 bp, Homo sapiens
gtgggggccgggagcgca

SEQ ID NO: 11602 - DNA, 18 bp, Homo sapiens
gtggggtcggaaaagctg

SEQ ID NO: 11603 - DNA, 18 bp, Homo sapiens
gtggggtcggcgggggac

SEQ ID NO: 11604 - DNA, 16 bp, Homo sapiens
gtggggtcgtgggtcc

SEQ ID NO: 11605 - DNA, 19 bp, Homo sapiens
gtggggtgcgcggtagcaa

SEQ ID NO: 11606 - DNA, 18 bp, Homo sapiens
gtggggtgtttgtcgcag

SEQ ID NO: 11607 - DNA, 18 bp, Homo sapiens
gtgggtcggacggcagtt

SEQ ID NO: 11608 - DNA, 16 bp, Homo sapiens
gtgggtgagttggctg

SEQ ID NO: 11609 - DNA, 21 bp, Homo sapiens
gtgggtgggatcgtggcggag

SEQ ID NO: 11610 - DNA, 17 bp, Homo sapiens
gtgggtggtgcggagtg

SEQ ID NO: 11611 - DNA, 18 bp, Homo sapiens
gtggtactgaggcagacg

SEQ ID NO: 11612 - DNA, 20 bp, Homo sapiens
gtggtagcgcggggactggc

SEQ ID NO: 11613 - DNA, 21 bp, Homo sapiens
gtggtcatggaggcgctgccg

SEQ ID NO: 11614 - DNA, 17 bp, Homo sapiens
gtggtcgcggtacctgt

SEQ ID NO: 11615 - DNA, 18 bp, Homo sapiens
gtggtcgtcgtcgcggca

SEQ ID NO: 11616 - DNA, 18 bp, Homo sapiens
gtggtctgaattgagaag

SEQ ID NO: 11617 - DNA, 17 bp, Homo sapiens
gtggtctggcggagctg

SEQ ID NO: 11618 - DNA, 22 bp, Homo sapiens
gtggtgacccgtgggacgcggc

SEQ ID NO: 11619 - DNA, 18 bp, Homo sapiens
gtggtgagagacggaccg

SEQ ID NO: 11620 - DNA, 21 bp, Homo sapiens
gtggtgagctagtaagtgtgg

SEQ ID NO: 11621 - DNA, 18 bp, Homo sapiens
gtggtgcacgggaaacgc

SEQ ID NO: 11622 - DNA, 20 bp, Homo sapiens
gtggtgctggcagcgacatg

SEQ ID NO: 11623 - DNA, 16 bp, Homo sapiens
cgccgcggaggagacc

SEQ ID NO: 11624 - DNA, 24 bp, Homo sapiens
cgccgcgggtgctgggggctcgag

SEQ ID NO: 11625 - DNA, 17 bp, Homo sapiens
cgccgctgactggcggg

SEQ ID NO: 11626 - DNA, 18 bp, Homo sapiens
cgccgctgccggagcagc

SEQ ID NO: 11627 - DNA, 17 bp, Homo sapiens
cgccgctggagcccggg

SEQ ID NO: 11628 - DNA, 17 bp, Homo sapiens
cgccggagacgtaggag

SEQ ID NO: 11629 - DNA, 21 bp, Homo sapiens
cgccggcactcgctcagcgac

SEQ ID NO: 11630 - DNA, 17 bp, Homo sapiens
cgccggccaagacagca

SEQ ID NO: 11631 - DNA, 23 bp, Homo sapiens
cgccggcgaggaatggcggtatt

SEQ ID NO: 11632 - DNA, 19 bp, Homo sapiens
cgccgggaggcgggaggag

SEQ ID NO: 11633 - DNA, 16 bp, Homo sapiens
cgccgggccatggggc

SEQ ID NO: 11634 - DNA, 19 bp, Homo sapiens
cgccgggcccctccggaaa

SEQ ID NO: 11635 - DNA, 20 bp, Homo sapiens
cgccgggcccgagtggcggc

SEQ ID NO: 11636 - DNA, 22 bp, Homo sapiens
cgccgggccgcctctgaggcca

SEQ ID NO: 11637 - DNA, 23 bp, Homo sapiens
cgccggggccgaaggcggcagag

SEQ ID NO: 11638 - DNA, 21 bp, Homo sapiens
cgccggggtggccgactgggt

SEQ ID NO: 11639 - DNA, 18 bp, Homo sapiens
cgccggtgcacgttggag

SEQ ID NO: 11640 - DNA, 17 bp, Homo sapiens
cgccgtctttgaaaaca

SEQ ID NO: 11641 - DNA, 20 bp, Homo sapiens
cgcctcagaaggctgcctcg

SEQ ID NO: 11642 - DNA, 21 bp, Homo sapiens
cgcctccagtggtgtggtgcg

SEQ ID NO: 11643 - DNA, 20 bp, Homo sapiens
cgcctccctccctccccacc

SEQ ID NO: 11644 - DNA, 16 bp, Homo sapiens
cgcctccctcctagtg

SEQ ID NO: 11645 - DNA, 21 bp, Homo sapiens
cgcctcggccgccgcaatgca

SEQ ID NO: 11646 - DNA, 18 bp, Homo sapiens
cgcctcgggcgtaaagag

SEQ ID NO: 11647 - DNA, 18 bp, Homo sapiens
cgcctctcttcggccctc

SEQ ID NO: 11648 - DNA, 19 bp, Homo sapiens
cgcctgagccgccatgtcg

SEQ ID NO: 11649 - DNA, 16 bp, Homo sapiens
cgcctgcagtgtggcc

SEQ ID NO: 11650 - DNA, 20 bp, Homo sapiens
cgcctgcgcatcggcgggcc

SEQ ID NO: 11651 - DNA, 18 bp, Homo sapiens
cgcctgctacgagtagaa

SEQ ID NO: 11652 - DNA, 19 bp, Homo sapiens
cgcctgctacgagtagaac

SEQ ID NO: 11653 - DNA, 20 bp, Homo sapiens
cgcctgctacgagtagaacg

SEQ ID NO: 11654 - DNA, 20 bp, Homo sapiens
cgcctgctggaaaagcagta

SEQ ID NO: 11655 - DNA, 20 bp, Homo sapiens
cgcctggcgctacgggtttc

SEQ ID NO: 11656 - DNA, 18 bp, Homo sapiens
cgcctggcggatgtaggt

SEQ ID NO: 11657 - DNA, 16 bp, Homo sapiens
cgcctggctgcagccc

SEQ ID NO: 11658 - DNA, 17 bp, Homo sapiens
cgcctgggagggagaaa

SEQ ID NO: 11659 - DNA, 16 bp, Homo sapiens
cgcgaccagaggacag

SEQ ID NO: 11660 - DNA, 18 bp, Homo sapiens
cgcgaccgaagcagggcg

SEQ ID NO: 11661 - DNA, 21 bp, Homo sapiens
cgcgaccgaagcagggcgcgc

SEQ ID NO: 11662 - DNA, 16 bp, Homo sapiens
cgcgacgcggaggttt

SEQ ID NO: 11663 - DNA, 23 bp, Homo sapiens
cgcgactaaggcttttttttttt

SEQ ID NO: 11664 - DNA, 18 bp, Homo sapiens
cgcgactgaccgtggtcg

SEQ ID NO: 11665 - DNA, 18 bp, Homo sapiens
cgcgactgccaggtacac

SEQ ID NO: 11666 - DNA, 22 bp, Homo sapiens
cgcgagccgggagcgggagcag

SEQ ID NO: 11667 - DNA, 18 bp, Homo sapiens
cgcgagcctgcgttttcc

SEQ ID NO: 11668 - DNA, 18 bp, Homo sapiens
cgcgaggacctgcggggc

SEQ ID NO: 11669 - DNA, 19 bp, Homo sapiens
cgcgaggaggtgaggctgg

SEQ ID NO: 11670 - DNA, 21 bp, Homo sapiens
cgcgaggcggcgaggcggcag

SEQ ID NO: 11671 - DNA, 18 bp, Homo sapiens
cgcgaggcggcgcactcg

SEQ ID NO: 11672 - DNA, 19 bp, Homo sapiens
cgcgaggctgggtacaggg

SEQ ID NO: 11673 - DNA, 18 bp, Homo sapiens
cgcgaggggtgcgcagca

SEQ ID NO: 11674 - DNA, 16 bp, Homo sapiens
cgcgaggttcgaggtg

SEQ ID NO: 11675 - DNA, 16 bp, Homo sapiens
cgcgagtcggcgcgcg

SEQ ID NO: 11676 - DNA, 16 bp, Homo sapiens
cgcgagtgggagcacc

SEQ ID NO: 11677 - DNA, 18 bp, Homo sapiens
cgcgagtgggagcaccag

SEQ ID NO: 11678 - DNA, 20 bp, Homo sapiens
cgcgagtgggagcaccagga

SEQ ID NO: 11679 - DNA, 17 bp, Homo sapiens
cgcgataggagagccga

SEQ ID NO: 11680 - DNA, 20 bp, Homo sapiens
gtggtggcttgttgggatcc

SEQ ID NO: 11681 - DNA, 18 bp, Homo sapiens
gtggtgggaaggctggcg

SEQ ID NO: 11682 - DNA, 21 bp, Homo sapiens
gtggtgggagaggtatcggca

SEQ ID NO: 11683 - DNA, 18 bp, Homo sapiens
gtggtgggcatcgaggtc

SEQ ID NO: 11684 - DNA, 18 bp, Homo sapiens
gtggtgtccagcagcatc

SEQ ID NO: 11685 - DNA, 20 bp, Homo sapiens
gtggttgagatgaaggctag

SEQ ID NO: 11686 - DNA, 19 bp, Homo sapiens
gtggtttttcggatcatgt

SEQ ID NO: 11687 - DNA, 16 bp, Homo sapiens
gtgtaagtcgcgactg

SEQ ID NO: 11688 - DNA, 18 bp, Homo sapiens
gtgtacggaggatgttcc

SEQ ID NO: 11689 - DNA, 20 bp, Homo sapiens
gtgtagagcgagcaggtctc

SEQ ID NO: 11690 - DNA, 18 bp, Homo sapiens
gtgtagatggcagggaat

SEQ ID NO: 11691 - DNA, 19 bp, Homo sapiens
gtgtagcggctgcagaggg

SEQ ID NO: 11692 - DNA, 19 bp, Homo sapiens
gtgtagtccgctccggcag

SEQ ID NO: 11693 - DNA, 19 bp, Homo sapiens
gtgtagttggcatctccgc

SEQ ID NO: 11694 - DNA, 23 bp, Homo sapiens
gtgtatgtgcgggcgagaagatg

SEQ ID NO: 11695 - DNA, 17 bp, Homo sapiens
gtgtcagccaagtagct

SEQ ID NO: 11696 - DNA, 20 bp, Homo sapiens
gtgtcagccgagggccgaaa

SEQ ID NO: 11697 - DNA, 16 bp, Homo sapiens
gtgtcaggatcgcggg

SEQ ID NO: 11698 - DNA, 18 bp, Homo sapiens
gtgtcagttgttgggctg

SEQ ID NO: 11699 - DNA, 19 bp, Homo sapiens
gtgtcagttgttgggctgt

SEQ ID NO: 11700 - DNA, 18 bp, Homo sapiens
gtgtcatggcggccggcg

SEQ ID NO: 11701 - DNA, 19 bp, Homo sapiens
gtgtccaagctacgccact

SEQ ID NO: 11702 - DNA, 22 bp, Homo sapiens
gtgtccccagggcaggaccgca

SEQ ID NO: 11703 - DNA, 18 bp, Homo sapiens
gtgtcccgacccctggga

SEQ ID NO: 11704 - DNA, 20 bp, Homo sapiens
gtgtccttcctccgctgccg

SEQ ID NO: 11705 - DNA, 21 bp, Homo sapiens
gtgtcgaggcgtcgggagggc

SEQ ID NO: 11706 - DNA, 18 bp, Homo sapiens
gtgtcgcggccggagcgg

SEQ ID NO: 11707 - DNA, 17 bp, Homo sapiens
gtgtcggaaagatggag

SEQ ID NO: 11708 - DNA, 17 bp, Homo sapiens
gtgtcgggaagatggcg

SEQ ID NO: 11709 - DNA, 18 bp, Homo sapiens
gtgtcgggcgcggcagga

SEQ ID NO: 11710 - DNA, 18 bp, Homo sapiens
gtgtcggggcacagttga

SEQ ID NO: 11711 - DNA, 17 bp, Homo sapiens
gtgtcgggtagaaaggg

SEQ ID NO: 11712 - DNA, 18 bp, Homo sapiens
gtgtcgtgcgcgtgagcc

SEQ ID NO: 11713 - DNA, 20 bp, Homo sapiens
gtgtcgtggacgccgtgccg

SEQ ID NO: 11714 - DNA, 18 bp, Homo sapiens
gtgtctcttagcagcgcg

SEQ ID NO: 11715 - DNA, 18 bp, Homo sapiens
gtgtctgccactcggctg

SEQ ID NO: 11716 - DNA, 20 bp, Homo sapiens
gtgtcttgaaactgacgtaa

SEQ ID NO: 11717 - DNA, 18 bp, Homo sapiens
gtgtgaagggagacagtg

SEQ ID NO: 11718 - DNA, 20 bp, Homo sapiens
gtgtgaatcgtgggtgggat

SEQ ID NO: 11719 - DNA, 17 bp, Homo sapiens
gtgtgacggctggaact

SEQ ID NO: 11720 - DNA, 20 bp, Homo sapiens
gtgtgagcagctgccgaagt

SEQ ID NO: 11721 - DNA, 18 bp, Homo sapiens
gtgtgagtaggggtcgtc

SEQ ID NO: 11722 - DNA, 20 bp, Homo sapiens
gtgtgagtcaggaagagggg

SEQ ID NO: 11723 - DNA, 21 bp, Homo sapiens
gtgtgccggaagtttcctcag

SEQ ID NO: 11724 - DNA, 18 bp, Homo sapiens
gtgtgcgccgggagctgg

SEQ ID NO: 11725 - DNA, 16 bp, Homo sapiens
gtgtgcgggagtttct

SEQ ID NO: 11726 - DNA, 18 bp, Homo sapiens
gtgtgctggtgaatgtga

SEQ ID NO: 11727 - DNA, 19 bp, Homo sapiens
gtgtgcttagtcatcgggt

SEQ ID NO: 11728 - DNA, 21 bp, Homo sapiens
gtgtggagctgttcgaggact

SEQ ID NO: 11729 - DNA, 18 bp, Homo sapiens
gtgtggaggtcgttggag

SEQ ID NO: 11730 - DNA, 18 bp, Homo sapiens
gtgtggagtctggagacg

SEQ ID NO: 11731 - DNA, 17 bp, Homo sapiens
gtgtggcagtcgcggaa

SEQ ID NO: 11732 - DNA, 19 bp, Homo sapiens
gtgtggcgccggaggacgt

SEQ ID NO: 11733 - DNA, 18 bp, Homo sapiens
gtgtggctatctgcagaa

SEQ ID NO: 11734 - DNA, 17 bp, Homo sapiens
gtgtggtcaggcggctc

SEQ ID NO: 11735 - DNA, 18 bp, Homo sapiens
gtgtggtcaggcggctcg

SEQ ID NO: 11736 - DNA, 16 bp, Homo sapiens
gtgtggtcggatccgg

SEQ ID NO: 11737 - DNA, 20 bp, Homo sapiens
cgcgatggaccgagggcccc

SEQ ID NO: 11738 - DNA, 18 bp, Homo sapiens
cgcgatgggggaagacga

SEQ ID NO: 11739 - DNA, 23 bp, Homo sapiens
cgcgcacagttgcggcgggagag

SEQ ID NO: 11740 - DNA, 18 bp, Homo sapiens
cgcgcacccaccgcgccg

SEQ ID NO: 11741 - DNA, 18 bp, Homo sapiens
cgcgcacctcatggttcc

SEQ ID NO: 11742 - DNA, 17 bp, Homo sapiens
cgcgcacgcccagcgag

SEQ ID NO: 11743 - DNA, 18 bp, Homo sapiens
cgcgcagaacttggggag

SEQ ID NO: 11744 - DNA, 19 bp, Homo sapiens
cgcgcagaacttggggagc

SEQ ID NO: 11745 - DNA, 20 bp, Homo sapiens
cgcgcagaaggaagtcggca

SEQ ID NO: 11746 - DNA, 18 bp, Homo sapiens
cgcgcagacagagcccag

SEQ ID NO: 11747 - DNA, 16 bp, Homo sapiens
cgcgcagctggaggcg

SEQ ID NO: 11748 - DNA, 18 bp, Homo sapiens
cgcgcagctggaggcggc

SEQ ID NO: 11749 - DNA, 17 bp, Homo sapiens
cgcgcaggaggacggag

SEQ ID NO: 11750 - DNA, 18 bp, Homo sapiens
cgcgcagtagacggagcg

SEQ ID NO: 11751 - DNA, 16 bp, Homo sapiens
cgcgcagtcgttcggg

SEQ ID NO: 11752 - DNA, 18 bp, Homo sapiens
cgcgcagttgcccacaga

SEQ ID NO: 11753 - DNA, 20 bp, Homo sapiens
cgcgcatggaacgcagcgaa

SEQ ID NO: 11754 - DNA, 17 bp, Homo sapiens
cgcgccaggccgaaccg

SEQ ID NO: 11755 - DNA, 18 bp, Homo sapiens
cgcgccaggccgaaccgc

SEQ ID NO: 11756 - DNA, 18 bp, Homo sapiens
cgcgccagggcgagggca

SEQ ID NO: 11757 - DNA, 19 bp, Homo sapiens
cgcgccagggcgagggcac

SEQ ID NO: 11758 - DNA, 17 bp, Homo sapiens
cgcgccagtgacagcga

SEQ ID NO: 11759 - DNA, 18 bp, Homo sapiens
cgcgcccgccaggagcca

SEQ ID NO: 11760 - DNA, 18 bp, Homo sapiens
cgcgcccgccatggccga

SEQ ID NO: 11761 - DNA, 17 bp, Homo sapiens
cgcgccctcgctccgcc

SEQ ID NO: 11762 - DNA, 22 bp, Homo sapiens
cgcgccgcgcgtgtggcagtcg

SEQ ID NO: 11763 - DNA, 18 bp, Homo sapiens
cgcgccggactgaggctg

SEQ ID NO: 11764 - DNA, 18 bp, Homo sapiens
cgcgccggagcgggaccg

SEQ ID NO: 11765 - DNA, 16 bp, Homo sapiens
cgcgccggccaccggc

SEQ ID NO: 11766 - DNA, 20 bp, Homo sapiens
cgcgccgggccgcgctgccg

SEQ ID NO: 11767 - DNA, 15 bp, Homo sapiens
cgcgccggggcggac

SEQ ID NO: 11768 - DNA, 16 bp, Homo sapiens
cgcgcctcgtcgtcgg

SEQ ID NO: 11769 - DNA, 18 bp, Homo sapiens
cgcgcctctgccgaggcg

SEQ ID NO: 11770 - DNA, 17 bp, Homo sapiens
cgcgcctgggagacgct

SEQ ID NO: 11771 - DNA, 18 bp, Homo sapiens
cgcgcgacgacgatgctc

SEQ ID NO: 11772 - DNA, 16 bp, Homo sapiens
cgcgcgacgccgccgc

SEQ ID NO: 11773 - DNA, 18 bp, Homo sapiens
cgcgcgaggaagcgcgac

SEQ ID NO: 11774 - DNA, 18 bp, Homo sapiens
cgcgcgagtggtgggcac

SEQ ID NO: 11775 - DNA, 13 bp, Homo sapiens
cgcgcgatggggc

SEQ ID NO: 11776 - DNA, 18 bp, Homo sapiens
cgcgcgcgcggcagctga

SEQ ID NO: 11777 - DNA, 18 bp, Homo sapiens
cgcgcgcggaggccgcga

SEQ ID NO: 11778 - DNA, 16 bp, Homo sapiens
cgcgcgctccctcctc

SEQ ID NO: 11779 - DNA, 23 bp, Homo sapiens
cgcgcgctctctggcaagaggca

SEQ ID NO: 11780 - DNA, 20 bp, Homo sapiens
cgcgcgcttgcggacgcggc

SEQ ID NO: 11781 - DNA, 19 bp, Homo sapiens
cgcgcggacagccagtcgg

SEQ ID NO: 11782 - DNA, 24 bp, Homo sapiens
cgcgcggagctgggggcggcgcgg

SEQ ID NO: 11783 - DNA, 18 bp, Homo sapiens
cgcgcggccggggaaggt

SEQ ID NO: 11784 - DNA, 18 bp, Homo sapiens
cgcgcggcgagctgaggg

SEQ ID NO: 11785 - DNA, 18 bp, Homo sapiens
cgcgcgggcgagcggttg

SEQ ID NO: 11786 - DNA, 18 bp, Homo sapiens
cgcgcgggctgcgggcgg

SEQ ID NO: 11787 - DNA, 18 bp, Homo sapiens
cgcgcggggggcgggcgg

SEQ ID NO: 11788 - DNA, 16 bp, Homo sapiens
cgcgcgtccggacacc

SEQ ID NO: 11789 - DNA, 20 bp, Homo sapiens
cgcgcgttaggaggctcggg

SEQ ID NO: 11790 - DNA, 17 bp, Homo sapiens
cgcgcgtttctcagggt

SEQ ID NO: 11791 - DNA, 22 bp, Homo sapiens
cgcgctacgtcatcactgcgcg

SEQ ID NO: 11792 - DNA, 19 bp, Homo sapiens
cgcgctagagagaaacatg

SEQ ID NO: 11793 - DNA, 18 bp, Homo sapiens
cgcgctcggaggccgccg

SEQ ID NO: 11794 - DNA, 18 bp, Homo sapiens
gtgtgtagttggcatctc

SEQ ID NO: 11795 - DNA, 22 bp, Homo sapiens
gtgtgtagttggcatctccgcg

SEQ ID NO: 11796 - DNA, 18 bp, Homo sapiens
gtgtgtcggaaagatgga

SEQ ID NO: 11797 - DNA, 20 bp, Homo sapiens
gtgtgtgaagggagacagtg

SEQ ID NO: 11798 - DNA, 21 bp, Homo sapiens
gtgtgtgagggagggagcgag

SEQ ID NO: 11799 - DNA, 17 bp, Homo sapiens
gtgtgtggaaaaggctt

SEQ ID NO: 11800 - DNA, 17 bp, Homo sapiens
gtgtgtggggaggtttg

SEQ ID NO: 11801 - DNA, 17 bp, Homo sapiens
gtgtgttagagaacgtc

SEQ ID NO: 11802 - DNA, 19 bp, Homo sapiens
gtgttaaggagaccgcagc

SEQ ID NO: 11803 - DNA, 20 bp, Homo sapiens
gtgttacaggaagtgggtaa

SEQ ID NO: 11804 - DNA, 19 bp, Homo sapiens
gtgttacccagtagctcct

SEQ ID NO: 11805 - DNA, 17 bp, Homo sapiens
gtgttagaaagcagcct

SEQ ID NO: 11806 - DNA, 16 bp, Homo sapiens
gtgttagagaacgtcg

SEQ ID NO: 11807 - DNA, 18 bp, Homo sapiens
gtgttattccttctctgc

SEQ ID NO: 11808 - DNA, 19 bp, Homo sapiens
gtgttcgcgggagcgccgc

SEQ ID NO: 11809 - DNA, 17 bp, Homo sapiens
gtgttcgggtatgaggc

SEQ ID NO: 11810 - DNA, 21 bp, Homo sapiens
gtgttgaggctaatggcggtg

SEQ ID NO: 11811 - DNA, 18 bp, Homo sapiens
gtgttggcgggtggcggg

SEQ ID NO: 11812 - DNA, 18 bp, Homo sapiens
gtgttgggactgtctggg

SEQ ID NO: 11813 - DNA, 20 bp, Homo sapiens
gtgttgggactgtctgggta

SEQ ID NO: 11814 - DNA, 20 bp, Homo sapiens
gtgttgggcggcagtgggcg

SEQ ID NO: 11815 - DNA, 21 bp, Homo sapiens
gtgtttctggatgcggggaca

SEQ ID NO: 11816 - DNA, 19 bp, Homo sapiens
gtgttttaaggcgccatga

SEQ ID NO: 11817 - DNA, 19 bp, Homo sapiens
gttaagctcgtgtaacggc

SEQ ID NO: 11818 - DNA, 17 bp, Homo sapiens
gttaagggtcggggtct

SEQ ID NO: 11819 - DNA, 16 bp, Homo sapiens
gttacggggctgggtg

SEQ ID NO: 11820 - DNA, 16 bp, Homo sapiens
gttactcaggtgcgct

SEQ ID NO: 11821 - DNA, 24 bp, Homo sapiens
gttactccggcttctccatagagg

SEQ ID NO: 11822 - DNA, 17 bp, Homo sapiens
gttactccgtccgaacg

SEQ ID NO: 11823 - DNA, 18 bp, Homo sapiens
gttacttcgcggagctgg

SEQ ID NO: 11824 - DNA, 16 bp, Homo sapiens
gttagagcccgtgcgg

SEQ ID NO: 11825 - DNA, 16 bp, Homo sapiens
gttaggaggctcgggt

SEQ ID NO: 11826 - DNA, 18 bp, Homo sapiens
gttaggagttgatggcag

SEQ ID NO: 11827 - DNA, 20 bp, Homo sapiens
gttagtgcaggtcctgaaac

SEQ ID NO: 11828 - DNA, 23 bp, Homo sapiens
gttatggccgctgccgcggctgt

SEQ ID NO: 11829 - DNA, 22 bp, Homo sapiens
gttatgtggcggagccgagcag

SEQ ID NO: 11830 - DNA, 19 bp, Homo sapiens
gttcaaacgcggcggcggg

SEQ ID NO: 11831 - DNA, 18 bp, Homo sapiens
gttcaaaggccaccctac

SEQ ID NO: 11832 - DNA, 19 bp, Homo sapiens
gttcaacacggaagtgtcc

SEQ ID NO: 11833 - DNA, 19 bp, Homo sapiens
gttcactcagacacgcagc

SEQ ID NO: 11834 - DNA, 18 bp, Homo sapiens
gttcactcctgggcaccc

SEQ ID NO: 11835 - DNA, 18 bp, Homo sapiens
gttcagaggaagaggaag

SEQ ID NO: 11836 - DNA, 23 bp, Homo sapiens
gttcagcgaccacggtgggtacc

SEQ ID NO: 11837 - DNA, 18 bp, Homo sapiens
gttcagcttagggaagga

SEQ ID NO: 11838 - DNA, 17 bp, Homo sapiens
gttccagccggagcggt

SEQ ID NO: 11839 - DNA, 17 bp, Homo sapiens
gttccagcgcagctaga

SEQ ID NO: 11840 - DNA, 20 bp, Homo sapiens
gttccagtccccactgacca

SEQ ID NO: 11841 - DNA, 18 bp, Homo sapiens
gttccccggccatcttag

SEQ ID NO: 11842 - DNA, 18 bp, Homo sapiens
gttccccggtttctcccc

SEQ ID NO: 11843 - DNA, 16 bp, Homo sapiens
gttccggcatcgtcgc

SEQ ID NO: 11844 - DNA, 20 bp, Homo sapiens
gttccggcctccaaggggcg

SEQ ID NO: 11845 - DNA, 17 bp, Homo sapiens
gttccggcgaagttaaa

SEQ ID NO: 11846 - DNA, 19 bp, Homo sapiens
gttccggctggggaagatg

SEQ ID NO: 11847 - DNA, 20 bp, Homo sapiens
gttccggggacagttagggc

SEQ ID NO: 11848 - DNA, 20 bp, Homo sapiens
gttccggtcagggtccgcga

SEQ ID NO: 11849 - DNA, 15 bp, Homo sapiens
gttccgtcagagcgg

SEQ ID NO: 11850 - DNA, 20 bp, Homo sapiens
gttccgtctgtgtgttcgag

SEQ ID NO: 11851 - DNA, 21 bp, Homo sapiens
cgcgctctctggcaagaggca

SEQ ID NO: 11852 - DNA, 17 bp, Homo sapiens
cgcgctcttcagcctgg

SEQ ID NO: 11853 - DNA, 18 bp, Homo sapiens
cgcgctgacgaagtttgg

SEQ ID NO: 11854 - DNA, 18 bp, Homo sapiens
cgcgctgcacaatggcgg

SEQ ID NO: 11855 - DNA, 21 bp, Homo sapiens
cgcgctgcacgcacagtacta

SEQ ID NO: 11856 - DNA, 19 bp, Homo sapiens
cgcgctgcgctgggcgcca

SEQ ID NO: 11857 - DNA, 18 bp, Homo sapiens
cgcgctgggagaagactt

SEQ ID NO: 11858 - DNA, 18 bp, Homo sapiens
cgcgctgggctgaggtta

SEQ ID NO: 11859 - DNA, 21 bp, Homo sapiens
cgcgctttcccccaagatggc

SEQ ID NO: 11860 - DNA, 18 bp, Homo sapiens
cgcgctttgggaacagga

SEQ ID NO: 11861 - DNA, 22 bp, Homo sapiens
cgcggaaaaagaggcagagcct

SEQ ID NO: 11862 - DNA, 20 bp, Homo sapiens
cgcggaagcagtgcagacgc

SEQ ID NO: 11863 - DNA, 18 bp, Homo sapiens
cgcggaccaccggggctg

SEQ ID NO: 11864 - DNA, 18 bp, Homo sapiens
cgcggaccagacagacct

SEQ ID NO: 11865 - DNA, 19 bp, Homo sapiens
cgcggacgcgcggcggagc

SEQ ID NO: 11866 - DNA, 18 bp, Homo sapiens
cgcggacgctggggacgg

SEQ ID NO: 11867 - DNA, 19 bp, Homo sapiens
cgcggacggacggacggag

SEQ ID NO: 11868 - DNA, 17 bp, Homo sapiens
cgcggagacaaagatgg

SEQ ID NO: 11869 - DNA, 21 bp, Homo sapiens
cgcggagaccgaaggctggcg

SEQ ID NO: 11870 - DNA, 18 bp, Homo sapiens
cgcggagacggtggagtc

SEQ ID NO: 11871 - DNA, 19 bp, Homo sapiens
cgcggagagctgggcagtg

SEQ ID NO: 11872 - DNA, 21 bp, Homo sapiens
cgcggagatgtgacccggcag

SEQ ID NO: 11873 - DNA, 18 bp, Homo sapiens
cgcggagcgcaggagctg

SEQ ID NO: 11874 - DNA, 17 bp, Homo sapiens
cgcggagcgcgcgcggc

SEQ ID NO: 11875 - DNA, 20 bp, Homo sapiens
cgcggagcggacggattcga

SEQ ID NO: 11876 - DNA, 18 bp, Homo sapiens
cgcggagcggagcggcgg

SEQ ID NO: 11877 - DNA, 18 bp, Homo sapiens
cgcggagcgggctgcgtc

SEQ ID NO: 11878 - DNA, 19 bp, Homo sapiens
cgcggagcgggtgggggcc

SEQ ID NO: 11879 - DNA, 16 bp, Homo sapiens
cgcggaggaagagagg

SEQ ID NO: 11880 - DNA, 18 bp, Homo sapiens
cgcggaggaggagacggg

SEQ ID NO: 11881 - DNA, 18 bp, Homo sapiens
cgcggaggcctaggcggg

SEQ ID NO: 11882 - DNA, 18 bp, Homo sapiens
cgcggagggccggagacg

SEQ ID NO: 11883 - DNA, 17 bp, Homo sapiens
cgcggagggctcggcga

SEQ ID NO: 11884 - DNA, 18 bp, Homo sapiens
cgcggagggctcggcgat

SEQ ID NO: 11885 - DNA, 16 bp, Homo sapiens
cgcggagggtcaggtc

SEQ ID NO: 11886 - DNA, 17 bp, Homo sapiens
cgcggaggtttcggagc

SEQ ID NO: 11887 - DNA, 18 bp, Homo sapiens
cgcggaggtttcggagca

SEQ ID NO: 11888 - DNA, 17 bp, Homo sapiens
cgcggatagcagaggag

SEQ ID NO: 11889 - DNA, 20 bp, Homo sapiens
cgcggatcgcagggagccgg

SEQ ID NO: 11890 - DNA, 18 bp, Homo sapiens
cgcggcaaacatggcggt

SEQ ID NO: 11891 - DNA, 19 bp, Homo sapiens
cgcggcagtgggcgccggc

SEQ ID NO: 11892 - DNA, 22 bp, Homo sapiens
cgcggcatactcagcggcagag

SEQ ID NO: 11893 - DNA, 16 bp, Homo sapiens
cgcggcatggggcgag

SEQ ID NO: 11894 - DNA, 18 bp, Homo sapiens
cgcggccaaggactgggc

SEQ ID NO: 11895 - DNA, 18 bp, Homo sapiens
cgcggcccgctccgtgtc

SEQ ID NO: 11896 - DNA, 18 bp, Homo sapiens
cgcggccctctgtaatgg

SEQ ID NO: 11897 - DNA, 21 bp, Homo sapiens
cgcggccctggcggtccagcg

SEQ ID NO: 11898 - DNA, 19 bp, Homo sapiens
cgcggccgattcgtttcca

SEQ ID NO: 11899 - DNA, 17 bp, Homo sapiens
cgcggccgccgctgata

SEQ ID NO: 11900 - DNA, 18 bp, Homo sapiens
cgcggccggcgctccagc

SEQ ID NO: 11901 - DNA, 21 bp, Homo sapiens
cgcggcctcagcagctgcggg

SEQ ID NO: 11902 - DNA, 24 bp, Homo sapiens
cgcggcctcagcagctgcgggaga

SEQ ID NO: 11903 - DNA, 21 bp, Homo sapiens
cgcggcctggcgcagcatacg

SEQ ID NO: 11904 - DNA, 20 bp, Homo sapiens
cgcggcctggtattccggcg

SEQ ID NO: 11905 - DNA, 13 bp, Homo sapiens
cgcggcgacgacc

SEQ ID NO: 11906 - DNA, 21 bp, Homo sapiens
cgcggcgcagcgaacgagcag

SEQ ID NO: 11907 - DNA, 19 bp, Homo sapiens
cgcggcgcggcatactcag

SEQ ID NO: 11908 - DNA, 15 bp, Homo sapiens
gttccgtggcgggaa

SEQ ID NO: 11909 - DNA, 18 bp, Homo sapiens
gttcctagcgcagagccg

SEQ ID NO: 11910 - DNA, 18 bp, Homo sapiens
gttcctccgcgagagccg

SEQ ID NO: 11911 - DNA, 18 bp, Homo sapiens
gttcctcgtctgccagcc

SEQ ID NO: 11912 - DNA, 18 bp, Homo sapiens
gttcctgagatgatctca

SEQ ID NO: 11913 - DNA, 15 bp, Homo sapiens
gttcctggcccgcgg

SEQ ID NO: 11914 - DNA, 18 bp, Homo sapiens
gttcgacacaccatgccg

SEQ ID NO: 11915 - DNA, 19 bp, Homo sapiens
gttcgaggactcgcgggtg

SEQ ID NO: 11916 - DNA, 18 bp, Homo sapiens
gttcgcaggacgggcgac

SEQ ID NO: 11917 - DNA, 17 bp, Homo sapiens
gttcgccgctggagccc

SEQ ID NO: 11918 - DNA, 18 bp, Homo sapiens
gttcggagaacgacggcg

SEQ ID NO: 11919 - DNA, 21 bp, Homo sapiens
gttcggagaacgacggcgccg

SEQ ID NO: 11920 - DNA, 18 bp, Homo sapiens
gttcggcggcattacctg

SEQ ID NO: 11921 - DNA, 22 bp, Homo sapiens
gttcggcggctctgggcgctgt

SEQ ID NO: 11922 - DNA, 17 bp, Homo sapiens
gttcggcggtcccgcgg

SEQ ID NO: 11923 - DNA, 18 bp, Homo sapiens
gttcggcgtttgctgggg

SEQ ID NO: 11924 - DNA, 19 bp, Homo sapiens
gttcgtgacccttgagaaa

SEQ ID NO: 11925 - DNA, 18 bp, Homo sapiens
gttcgtttttcctttagt

SEQ ID NO: 11926 - DNA, 20 bp, Homo sapiens
gttctagtgtcggagttggg

SEQ ID NO: 11927 - DNA, 17 bp, Homo sapiens
gttctatggccgctgca

SEQ ID NO: 11928 - DNA, 16 bp, Homo sapiens
gttctgcgtctcgggg

SEQ ID NO: 11929 - DNA, 20 bp, Homo sapiens
gttctggggcactgggaaga

SEQ ID NO: 11930 - DNA, 18 bp, Homo sapiens
gttcttcactcgcgactg

SEQ ID NO: 11931 - DNA, 19 bp, Homo sapiens
gttcttcgtaggcggagtc

SEQ ID NO: 11932 - DNA, 18 bp, Homo sapiens
gttcttggaaggcggtgc

SEQ ID NO: 11933 - DNA, 19 bp, Homo sapiens
gttgaaaggagtgcagaga

SEQ ID NO: 11934 - DNA, 21 bp, Homo sapiens
gttgaaaggagtgcagagagg

SEQ ID NO: 11935 - DNA, 18 bp, Homo sapiens
gttgaagagctcgagatg

SEQ ID NO: 11936 - DNA, 16 bp, Homo sapiens
gttgacgggctgggcg

SEQ ID NO: 11937 - DNA, 18 bp, Homo sapiens
gttgagagaacggagcgg

SEQ ID NO: 11938 - DNA, 22 bp, Homo sapiens
gttgagagaacggagcggacgc

SEQ ID NO: 11939 - DNA, 19 bp, Homo sapiens
gttgagagacagaggcacc

SEQ ID NO: 11940 - DNA, 18 bp, Homo sapiens
gttgaggcggctgcggca

SEQ ID NO: 11941 - DNA, 18 bp, Homo sapiens
gttgagtaatctcagata

SEQ ID NO: 11942 - DNA, 19 bp, Homo sapiens
gttgagtcagttgtgggac

SEQ ID NO: 11943 - DNA, 19 bp, Homo sapiens
gttgagtgaagaaaatcca

SEQ ID NO: 11944 - DNA, 20 bp, Homo sapiens
gttgcaacggagataaattc

SEQ ID NO: 11945 - DNA, 18 bp, Homo sapiens
gttgcaagtgttgcggtg

SEQ ID NO: 11946 - DNA, 19 bp, Homo sapiens
gttgcaccatcccagaagc

SEQ ID NO: 11947 - DNA, 18 bp, Homo sapiens
gttgcattttgtttagta

SEQ ID NO: 11948 - DNA, 16 bp, Homo sapiens
gttgccatggatcctg

SEQ ID NO: 11949 - DNA, 21 bp, Homo sapiens
gttgcccacagacccggaagt

SEQ ID NO: 11950 - DNA, 20 bp, Homo sapiens
gttgcccgggactaggagct

SEQ ID NO: 11951 - DNA, 18 bp, Homo sapiens
gttgccggcaccatggag

SEQ ID NO: 11952 - DNA, 17 bp, Homo sapiens
gttgccgggccagggtc

SEQ ID NO: 11953 - DNA, 18 bp, Homo sapiens
gttgcctgggctggacgt

SEQ ID NO: 11954 - DNA, 19 bp, Homo sapiens
gttgcctgggctggacgtg

SEQ ID NO: 11955 - DNA, 18 bp, Homo sapiens
gttgcgaagggttgtttg

SEQ ID NO: 11956 - DNA, 18 bp, Homo sapiens
gttgcggccatcgccctg

SEQ ID NO: 11957 - DNA, 17 bp, Homo sapiens
gttgcgggctccggggc

SEQ ID NO: 11958 - DNA, 20 bp, Homo sapiens
gttgcggtaccaggtccgcg

SEQ ID NO: 11959 - DNA, 17 bp, Homo sapiens
gttgcggttagtggacc

SEQ ID NO: 11960 - DNA, 16 bp, Homo sapiens
gttgctagagagagtc

SEQ ID NO: 11961 - DNA, 16 bp, Homo sapiens
gttgctaggcggagtc

SEQ ID NO: 11962 - DNA, 18 bp, Homo sapiens
gttgctgggagcgacgcg

SEQ ID NO: 11963 - DNA, 19 bp, Homo sapiens
gttgctttccaaaatggcg

SEQ ID NO: 11964 - DNA, 18 bp, Homo sapiens
gttggacgacaaagatgg

SEQ ID NO: 11965 - DNA, 23 bp, Homo sapiens
cgcggcgcggcatactcagcggc

SEQ ID NO: 11966 - DNA, 20 bp, Homo sapiens
cgcggcgcggggcgggagct

SEQ ID NO: 11967 - DNA, 17 bp, Homo sapiens
cgcggcggaggaagtga

SEQ ID NO: 11968 - DNA, 23 bp, Homo sapiens
cgcggcggaggaagtgaggacgg

SEQ ID NO: 11969 - DNA, 18 bp, Homo sapiens
cgcggcggcattaaacgg

SEQ ID NO: 11970 - DNA, 21 bp, Homo sapiens
cgcggcggccgcggagtatcc

SEQ ID NO: 11971 - DNA, 17 bp, Homo sapiens
cgcggcggcgcgcggag

SEQ ID NO: 11972 - DNA, 20 bp, Homo sapiens
cgcggcggcgcggagctcgg

SEQ ID NO: 11973 - DNA, 21 bp, Homo sapiens
cgcggcggcggcgacagcagc

SEQ ID NO: 11974 - DNA, 18 bp, Homo sapiens
cgcggcggcggcgggagc

SEQ ID NO: 11975 - DNA, 17 bp, Homo sapiens
cgcggcggtgccgcggg

SEQ ID NO: 11976 - DNA, 16 bp, Homo sapiens
cgcggcgtcggagcgg

SEQ ID NO: 11977 - DNA, 19 bp, Homo sapiens
cgcggcgtgggtaagctgc

SEQ ID NO: 11978 - DNA, 23 bp, Homo sapiens
cgcggctcggggcccttgcggcg

SEQ ID NO: 11979 - DNA, 19 bp, Homo sapiens
cgcggctctgaaacagtta

SEQ ID NO: 11980 - DNA, 18 bp, Homo sapiens
cgcggctgctgaggcgga

SEQ ID NO: 11981 - DNA, 18 bp, Homo sapiens
cgcggctggggaaggtga

SEQ ID NO: 11982 - DNA, 18 bp, Homo sapiens
cgcgggaagggtactcca

SEQ ID NO: 11983 - DNA, 18 bp, Homo sapiens
cgcgggacggagcttggc

SEQ ID NO: 11984 - DNA, 18 bp, Homo sapiens
cgcgggaggatggagcag

SEQ ID NO: 11985 - DNA, 18 bp, Homo sapiens
cgcgggaggcgggggcag

SEQ ID NO: 11986 - DNA, 18 bp, Homo sapiens
cgcgggcaacttccggtg

SEQ ID NO: 11987 - DNA, 19 bp, Homo sapiens
cgcgggcaggatacaccgt

SEQ ID NO: 11988 - DNA, 16 bp, Homo sapiens
cgcgggccgactggtg

SEQ ID NO: 11989 - DNA, 18 bp, Homo sapiens
cgcgggccgactggtgtt

SEQ ID NO: 11990 - DNA, 18 bp, Homo sapiens
cgcgggcgagcggttgtg

SEQ ID NO: 11991 - DNA, 19 bp, Homo sapiens
cgcgggcgatttgtaggta

SEQ ID NO: 11992 - DNA, 18 bp, Homo sapiens
cgcgggcggcgagacggc

SEQ ID NO: 11993 - DNA, 18 bp, Homo sapiens
cgcgggcgggcgaggcgc

SEQ ID NO: 11994 - DNA, 19 bp, Homo sapiens
cgcgggcgggctgagtgag

SEQ ID NO: 11995 - DNA, 18 bp, Homo sapiens
cgcgggctacctcagttc

SEQ ID NO: 11996 - DNA, 18 bp, Homo sapiens
cgcgggctgcgcgcgcta

SEQ ID NO: 11997 - DNA, 19 bp, Homo sapiens
cgcgggctggagctgcggc

SEQ ID NO: 11998 - DNA, 19 bp, Homo sapiens
cgcgggctgtccggagggg

SEQ ID NO: 11999 - DNA, 20 bp, Homo sapiens
cgcggggccgctccgaggag

SEQ ID NO: 12000 - DNA, 16 bp, Homo sapiens
cgcggggcgagccagc

SEQ ID NO: 12001 - DNA, 19 bp, Homo sapiens
cgcgggggaactagctgga

SEQ ID NO: 12002 - DNA, 17 bp, Homo sapiens
cgcgggggaaggggagg

SEQ ID NO: 12003 - DNA, 18 bp, Homo sapiens
cgcggggtccgctatggc

SEQ ID NO: 12004 - DNA, 19 bp, Homo sapiens
cgcggggtccggacagccg

SEQ ID NO: 12005 - DNA, 23 bp, Homo sapiens
cgcggggtgcgaatctacgatgg

SEQ ID NO: 12006 - DNA, 20 bp, Homo sapiens
cgcgggtccggcgccgaggt

SEQ ID NO: 12007 - DNA, 17 bp, Homo sapiens
cgcgggtcgcggacgct

SEQ ID NO: 12008 - DNA, 18 bp, Homo sapiens
cgcgggtgtgaggcggtg

SEQ ID NO: 12009 - DNA, 18 bp, Homo sapiens
cgcgggtgttgagagcgg

SEQ ID NO: 12010 - DNA, 19 bp, Homo sapiens
cgcgggttggggcggttgg

SEQ ID NO: 12011 - DNA, 21 bp, Homo sapiens
cgcggtagcgcggattgcggt

SEQ ID NO: 12012 - DNA, 18 bp, Homo sapiens
cgcggtaggccctgagga

SEQ ID NO: 12013 - DNA, 16 bp, Homo sapiens
cgcggtcgggacacag

SEQ ID NO: 12014 - DNA, 17 bp, Homo sapiens
cgcggtctcagggaagg

SEQ ID NO: 12015 - DNA, 19 bp, Homo sapiens
cgcggtctgtagtgaaggt

SEQ ID NO: 12016 - DNA, 19 bp, Homo sapiens
cgcggtgcacagaggcttg

SEQ ID NO: 12017 - DNA, 18 bp, Homo sapiens
cgcggtgcagggctctta

SEQ ID NO: 12018 - DNA, 23 bp, Homo sapiens
cgcggtgctctccgcagccccgg

SEQ ID NO: 12019 - DNA, 24 bp, Homo sapiens
cgcggtgctctccgcagccccgga

SEQ ID NO: 12020 - DNA, 19 bp, Homo sapiens
cgcggtggcggcggcggcc

SEQ ID NO: 12021 - DNA, 18 bp, Homo sapiens
cgcggtggggacgcgctg

SEQ ID NO: 12022 - DNA, 16 bp, Homo sapiens
gttggagcggagactg

SEQ ID NO: 12023 - DNA, 18 bp, Homo sapiens
gttggaggcttcgcccgg

SEQ ID NO: 12024 - DNA, 17 bp, Homo sapiens
gttggaggtcggcgata

SEQ ID NO: 12025 - DNA, 21 bp, Homo sapiens
gttggcagctgccgggcggtc

SEQ ID NO: 12026 - DNA, 22 bp, Homo sapiens
gttggccctcttttccgtggcg

SEQ ID NO: 12027 - DNA, 18 bp, Homo sapiens
gttggcgggctggcaggc

SEQ ID NO: 12028 - DNA, 18 bp, Homo sapiens
gttggctgccggtgagtt

SEQ ID NO: 12029 - DNA, 16 bp, Homo sapiens
gttggctgtttctggc

SEQ ID NO: 12030 - DNA, 18 bp, Homo sapiens
gttgggaaagtgagggat

SEQ ID NO: 12031 - DNA, 17 bp, Homo sapiens
gttgggaaagtgtcggt

SEQ ID NO: 12032 - DNA, 19 bp, Homo sapiens
gttgggaacgcggagcgga

SEQ ID NO: 12033 - DNA, 18 bp, Homo sapiens
gttgggactgtctgggta

SEQ ID NO: 12034 - DNA, 19 bp, Homo sapiens
gttgggcggtgctggtttt

SEQ ID NO: 12035 - DNA, 18 bp, Homo sapiens
gttggggactaaggcgtc

SEQ ID NO: 12036 - DNA, 17 bp, Homo sapiens
gttggtccgcgcgttgc

SEQ ID NO: 12037 - DNA, 20 bp, Homo sapiens
gttggtctggaccggaagcg

SEQ ID NO: 12038 - DNA, 14 bp, Homo sapiens
gttggtgcgcgacg

SEQ ID NO: 12039 - DNA, 18 bp, Homo sapiens
gttggtggcggcggcgag

SEQ ID NO: 12040 - DNA, 18 bp, Homo sapiens
gttggttttagaagttgc

SEQ ID NO: 12041 - DNA, 18 bp, Homo sapiens
gttgtagaaggtatgagg

SEQ ID NO: 12042 - DNA, 17 bp, Homo sapiens
gttgtaggaccggcgag

SEQ ID NO: 12043 - DNA, 20 bp, Homo sapiens
gttgtcaccgctggagacgg

SEQ ID NO: 12044 - DNA, 18 bp, Homo sapiens
gttgtctgagcgagcgcg

SEQ ID NO: 12045 - DNA, 18 bp, Homo sapiens
gttgtctgcgtctcgagg

SEQ ID NO: 12046 - DNA, 17 bp, Homo sapiens
gttgtctgtgtttaacc

SEQ ID NO: 12047 - DNA, 20 bp, Homo sapiens
gttgtgagcgggaaggtagg

SEQ ID NO: 12048 - DNA, 18 bp, Homo sapiens
gttgtgaggagtcgccgc

SEQ ID NO: 12049 - DNA, 22 bp, Homo sapiens
gttgtggaaggcgacagaagtc

SEQ ID NO: 12050 - DNA, 22 bp, Homo sapiens
gttgtggagtggcgtagacgag

SEQ ID NO: 12051 - DNA, 20 bp, Homo sapiens
gttgtgtctgaggaggaggt

SEQ ID NO: 12052 - DNA, 18 bp, Homo sapiens
gttgttctcggcgggctg

SEQ ID NO: 12053 - DNA, 21 bp, Homo sapiens
gttgttgattggggtcctcga

SEQ ID NO: 12054 - DNA, 20 bp, Homo sapiens
gttgttgggctgtaatggcg

SEQ ID NO: 12055 - DNA, 17 bp, Homo sapiens
gtttcagaagcgttggg

SEQ ID NO: 12056 - DNA, 18 bp, Homo sapiens
gtttcagacggtgaggac

SEQ ID NO: 12057 - DNA, 20 bp, Homo sapiens
gtttcagacggtgaggaccc

SEQ ID NO: 12058 - DNA, 18 bp, Homo sapiens
gtttcagacttcagaagg

SEQ ID NO: 12059 - DNA, 19 bp, Homo sapiens
gtttcagacttcagaagga

SEQ ID NO: 12060 - DNA, 18 bp, Homo sapiens
gtttcaggaccgttggca

SEQ ID NO: 12061 - DNA, 19 bp, Homo sapiens
gtttccgaagggaccaccg

SEQ ID NO: 12062 - DNA, 17 bp, Homo sapiens
gtttccggcgcggccca

SEQ ID NO: 12063 - DNA, 21 bp, Homo sapiens
gtttccgttctgagctcgcag

SEQ ID NO: 12064 - DNA, 17 bp, Homo sapiens
gtttcgaggccagacgt

SEQ ID NO: 12065 - DNA, 17 bp, Homo sapiens
gtttcggaccccagcgg

SEQ ID NO: 12066 - DNA, 16 bp, Homo sapiens
gtttcggttggaggac

SEQ ID NO: 12067 - DNA, 21 bp, Homo sapiens
gtttctctttcttcctgtctg

SEQ ID NO: 12068 - DNA, 20 bp, Homo sapiens
gtttctgagcgttggccttt

SEQ ID NO: 12069 - DNA, 17 bp, Homo sapiens
gtttctgaggttcttca

SEQ ID NO: 12070 - DNA, 18 bp, Homo sapiens
gtttctggatgcggggac

SEQ ID NO: 12071 - DNA, 18 bp, Homo sapiens
gtttctgggagccaagag

SEQ ID NO: 12072 - DNA, 17 bp, Homo sapiens
gtttgaatcgcggtgcg

SEQ ID NO: 12073 - DNA, 17 bp, Homo sapiens
gtttgatttcgtcctgg

SEQ ID NO: 12074 - DNA, 17 bp, Homo sapiens
gtttgcagcatagaagc

SEQ ID NO: 12075 - DNA, 18 bp, Homo sapiens
gtttgcagcatagaagct

SEQ ID NO: 12076 - DNA, 20 bp, Homo sapiens
gtttgctcttaatttcagag

SEQ ID NO: 12077 - DNA, 21 bp, Homo sapiens
gtttgctcttaatttcagagc

SEQ ID NO: 12078 - DNA, 17 bp, Homo sapiens
gtttggcaacgaggacg

SEQ ID NO: 12079 - DNA, 20 bp, Homo sapiens
cgcggtggggacgcgctgtg

SEQ ID NO: 12080 - DNA, 19 bp, Homo sapiens
cgcggttccgcgcggcgcc

SEQ ID NO: 12081 - DNA, 18 bp, Homo sapiens
cgcgtacacccagacatc

SEQ ID NO: 12082 - DNA, 22 bp, Homo sapiens
cgcgtaggccagctggccggat

SEQ ID NO: 12083 - DNA, 16 bp, Homo sapiens
cgcgtagtaggacggt

SEQ ID NO: 12084 - DNA, 15 bp, Homo sapiens
cgcgtcacgtgggcc

SEQ ID NO: 12085 - DNA, 17 bp, Homo sapiens
cgcgtccggtttgctgg

SEQ ID NO: 12086 - DNA, 16 bp, Homo sapiens
cgcgtcctctgcctgt

SEQ ID NO: 12087 - DNA, 17 bp, Homo sapiens
cgcgtcggggcggcccg

SEQ ID NO: 12088 - DNA, 19 bp, Homo sapiens
cgcgtctctgggcttttgc

SEQ ID NO: 12089 - DNA, 18 bp, Homo sapiens
cgcgtcttgttcttgcct

SEQ ID NO: 12090 - DNA, 18 bp, Homo sapiens
cgcgtgacggaggagcgg

SEQ ID NO: 12091 - DNA, 20 bp, Homo sapiens
cgcgtgcgccggtggcggga

SEQ ID NO: 12092 - DNA, 18 bp, Homo sapiens
cgcgtggacggttgggat

SEQ ID NO: 12093 - DNA, 22 bp, Homo sapiens
cgcgtgggtctgcgggcgcccc

SEQ ID NO: 12094 - DNA, 22 bp, Homo sapiens
cgcgtggtaggtgagtgcgcgg

SEQ ID NO: 12095 - DNA, 18 bp, Homo sapiens
cgcgtgtagaatgtgggg

SEQ ID NO: 12096 - DNA, 22 bp, Homo sapiens
cgctacagggggggcctgaggc

SEQ ID NO: 12097 - DNA, 21 bp, Homo sapiens
cgctagacctggacaagtatg

SEQ ID NO: 12098 - DNA, 18 bp, Homo sapiens
cgctagcccgcagcgctc

SEQ ID NO: 12099 - DNA, 18 bp, Homo sapiens
cgctaggcggacggacca

SEQ ID NO: 12100 - DNA, 17 bp, Homo sapiens
cgctatataaaggagag

SEQ ID NO: 12101 - DNA, 18 bp, Homo sapiens
cgctcacttccagggtcg

SEQ ID NO: 12102 - DNA, 19 bp, Homo sapiens
cgctcagatacgcgacgcg

SEQ ID NO: 12103 - DNA, 16 bp, Homo sapiens
cgctccagcgaggcgc

SEQ ID NO: 12104 - DNA, 16 bp, Homo sapiens
cgctccaggtccggga

SEQ ID NO: 12105 - DNA, 17 bp, Homo sapiens
cgctccaggtccgggac

SEQ ID NO: 12106 - DNA, 19 bp, Homo sapiens
cgctccaggtccgggactg

SEQ ID NO: 12107 - DNA, 18 bp, Homo sapiens
cgctcccctgtgaggctg

SEQ ID NO: 12108 - DNA, 19 bp, Homo sapiens
cgctccctctctgctgatc

SEQ ID NO: 12109 - DNA, 22 bp, Homo sapiens
cgctccctggcgtgactcggca

SEQ ID NO: 12110 - DNA, 16 bp, Homo sapiens
cgctcccttatcggcc

SEQ ID NO: 12111 - DNA, 20 bp, Homo sapiens
cgctccgcattgcagactgc

SEQ ID NO: 12112 - DNA, 20 bp, Homo sapiens
cgctccggcagcgcgctctg

SEQ ID NO: 12113 - DNA, 18 bp, Homo sapiens
cgctcgagttcctgcgcg

SEQ ID NO: 12114 - DNA, 17 bp, Homo sapiens
cgctcgcattctacgta

SEQ ID NO: 12115 - DNA, 16 bp, Homo sapiens
cgctcgccgcctcgcg

SEQ ID NO: 12116 - DNA, 18 bp, Homo sapiens
cgctcgcgctggaagaag

SEQ ID NO: 12117 - DNA, 16 bp, Homo sapiens
cgctcggctcgcagga

SEQ ID NO: 12118 - DNA, 16 bp, Homo sapiens
cgctcggctgaggcgc

SEQ ID NO: 12119 - DNA, 18 bp, Homo sapiens
cgctcggctgccggtggc

SEQ ID NO: 12120 - DNA, 20 bp, Homo sapiens
cgctcggtcccgaccgagag

SEQ ID NO: 12121 - DNA, 22 bp, Homo sapiens
cgctcgtcttcgcccgccatgg

SEQ ID NO: 12122 - DNA, 18 bp, Homo sapiens
cgctctcgaggactacgt

SEQ ID NO: 12123 - DNA, 20 bp, Homo sapiens
cgctctctggcaagaggcaa

SEQ ID NO: 12124 - DNA, 17 bp, Homo sapiens
cgctctttacaaaggcc

SEQ ID NO: 12125 - DNA, 20 bp, Homo sapiens
cgctgacgtgtctgggcggt

SEQ ID NO: 12126 - DNA, 23 bp, Homo sapiens
cgctgacgtgtctgggcggtcgg

SEQ ID NO: 12127 - DNA, 18 bp, Homo sapiens
cgctgagaacgcgggtcc

SEQ ID NO: 12128 - DNA, 19 bp, Homo sapiens
cgctgagaacgcgggtcca

SEQ ID NO: 12129 - DNA, 20 bp, Homo sapiens
cgctgagaacgcgggtccac

SEQ ID NO: 12130 - DNA, 18 bp, Homo sapiens
cgctgagcacactggaag

SEQ ID NO: 12131 - DNA, 18 bp, Homo sapiens
cgctgaggcgcctgctca

SEQ ID NO: 12132 - DNA, 21 bp, Homo sapiens
cgctgaggcgcctgctcagtg

SEQ ID NO: 12133 - DNA, 18 bp, Homo sapiens
cgctgaggtcggtcggac

SEQ ID NO: 12134 - DNA, 18 bp, Homo sapiens
cgctgatgggaggatgga

SEQ ID NO: 12135 - DNA, 18 bp, Homo sapiens
cgctgcacaacaacaaaa

SEQ ID NO: 12136 - DNA, 18 bp, Homo sapiens
gtttggctcggcgcggtg

SEQ ID NO: 12137 - DNA, 18 bp, Homo sapiens
gtttggtcagaagggggg

SEQ ID NO: 12138 - DNA, 20 bp, Homo sapiens
gtttgtgagtggaagggagg

SEQ ID NO: 12139 - DNA, 18 bp, Homo sapiens
gtttgtggcccaggtgca

SEQ ID NO: 12140 - DNA, 19 bp, Homo sapiens
gttttaaggggaggaccgg

SEQ ID NO: 12141 - DNA, 17 bp, Homo sapiens
gttttccgtccgcgact

SEQ ID NO: 12142 - DNA, 19 bp, Homo sapiens
gttttctcagccaggcggc

SEQ ID NO: 12143 - DNA, 22 bp, Homo sapiens
gttttctcgcttggatcttggc

SEQ ID NO: 12144 - DNA, 19 bp, Homo sapiens
gttttctgtctagctccga

SEQ ID NO: 12145 - DNA, 18 bp, Homo sapiens
gttttgcagacgccaccg

SEQ ID NO: 12146 - DNA, 18 bp, Homo sapiens
gttttgcagtggccgtgg

SEQ ID NO: 12147 - DNA, 18 bp, Homo sapiens
gttttgctccgcccggcc

SEQ ID NO: 12148 - DNA, 18 bp, Homo sapiens
gttttgctgccgggagtt

SEQ ID NO: 12149 - DNA, 18 bp, Homo sapiens
gttttttgtggcttcctt

SEQ ID NO: 12150 - DNA, 23 bp, Homo sapiens
taaacaaacctcgcctggctccc

SEQ ID NO: 12151 - DNA, 20 bp, Homo sapiens
taaaccgtacgtccgtttgt

SEQ ID NO: 12152 - DNA, 17 bp, Homo sapiens
taaagaagtcatggcgg

SEQ ID NO: 12153 - DNA, 18 bp, Homo sapiens
taaagaagtcatggcggc

SEQ ID NO: 12154 - DNA, 21 bp, Homo sapiens
taaaggacgcgaccgccgcag

SEQ ID NO: 12155 - DNA, 18 bp, Homo sapiens
taaaggagagaagcgggc

SEQ ID NO: 12156 - DNA, 17 bp, Homo sapiens
taaatccgggcttgcgg

SEQ ID NO: 12157 - DNA, 22 bp, Homo sapiens
taaatcctcccggccgctcaca

SEQ ID NO: 12158 - DNA, 18 bp, Homo sapiens
taaatgggcgccggcgga

SEQ ID NO: 12159 - DNA, 18 bp, Homo sapiens
taacaagatggcgtcgtc

SEQ ID NO: 12160 - DNA, 18 bp, Homo sapiens
taacaggagcagcctccg

SEQ ID NO: 12161 - DNA, 18 bp, Homo sapiens
taacccctcggctttctg

SEQ ID NO: 12162 - DNA, 17 bp, Homo sapiens
taacgagcggcggcggc

SEQ ID NO: 12163 - DNA, 21 bp, Homo sapiens
taacggtcgcgcggccgtcgc

SEQ ID NO: 12164 - DNA, 19 bp, Homo sapiens
taacgtagtccctcagtgc

SEQ ID NO: 12165 - DNA, 22 bp, Homo sapiens
taacgtagtccctcagtgcgca

SEQ ID NO: 12166 - DNA, 17 bp, Homo sapiens
taactaccaccatctcc

SEQ ID NO: 12167 - DNA, 20 bp, Homo sapiens
taactccactggctgcggca

SEQ ID NO: 12168 - DNA, 18 bp, Homo sapiens
taactccgcggtcagttc

SEQ ID NO: 12169 - DNA, 20 bp, Homo sapiens
taactggagcacggagctgc

SEQ ID NO: 12170 - DNA, 18 bp, Homo sapiens
taagaattcaaaatgtcc

SEQ ID NO: 12171 - DNA, 17 bp, Homo sapiens
taagacggtgaggtcag

SEQ ID NO: 12172 - DNA, 18 bp, Homo sapiens
taagactcagagctacgg

SEQ ID NO: 12173 - DNA, 19 bp, Homo sapiens
taagactcagagctacggc

SEQ ID NO: 12174 - DNA, 18 bp, Homo sapiens
taagctggtggcagcagc

SEQ ID NO: 12175 - DNA, 23 bp, Homo sapiens
taaggaaatggccggggagctcc

SEQ ID NO: 12176 - DNA, 20 bp, Homo sapiens
taaggaagtgcttttgaatg

SEQ ID NO: 12177 - DNA, 21 bp, Homo sapiens
taaggaagtgcttttgaatga

SEQ ID NO: 12178 - DNA, 19 bp, Homo sapiens
taagggctcagagttgcac

SEQ ID NO: 12179 - DNA, 21 bp, Homo sapiens
taagggctcagagttgcactg

SEQ ID NO: 12180 - DNA, 18 bp, Homo sapiens
taagggttctgctctgac

SEQ ID NO: 12181 - DNA, 24 bp, Homo sapiens
taaggtcgggccatggtggggcag

SEQ ID NO: 12182 - DNA, 20 bp, Homo sapiens
taagtcctggtctgcgtgga

SEQ ID NO: 12183 - DNA, 20 bp, Homo sapiens
taagtctgtggaggcttccg

SEQ ID NO: 12184 - DNA, 16 bp, Homo sapiens
taagtgggtagcaggg

SEQ ID NO: 12185 - DNA, 20 bp, Homo sapiens
taagttccagcgcagctaga

SEQ ID NO: 12186 - DNA, 16 bp, Homo sapiens
taagttgaagcgggtc

SEQ ID NO: 12187 - DNA, 21 bp, Homo sapiens
taagttggtcatgatgcagaa

SEQ ID NO: 12188 - DNA, 17 bp, Homo sapiens
taataacggacaacaga

SEQ ID NO: 12189 - DNA, 18 bp, Homo sapiens
taatagcccggagacaag

SEQ ID NO: 12190 - DNA, 18 bp, Homo sapiens
taatcctgcagtcatggc

SEQ ID NO: 12191 - DNA, 18 bp, Homo sapiens
taatggggggaaaagggc

SEQ ID NO: 12192 - DNA, 19 bp, Homo sapiens
taatggggggaaaagggcg

SEQ ID NO: 12193 - DNA, 17 bp, Homo sapiens
cgctgcacaatggcggc

SEQ ID NO: 12194 - DNA, 17 bp, Homo sapiens
cgctgcagcaggcgggg

SEQ ID NO: 12195 - DNA, 18 bp, Homo sapiens
cgctgcgaggaggcgccc

SEQ ID NO: 12196 - DNA, 18 bp, Homo sapiens
cgctgcgcgacgacagga

SEQ ID NO: 12197 - DNA, 18 bp, Homo sapiens
cgctgcggagtgaacggt

SEQ ID NO: 12198 - DNA, 19 bp, Homo sapiens
cgctgcggagtgaacggtg

SEQ ID NO: 12199 - DNA, 18 bp, Homo sapiens
cgctgcggcgggaggtgg

SEQ ID NO: 12200 - DNA, 18 bp, Homo sapiens
cgctgcgggctcggagag

SEQ ID NO: 12201 - DNA, 21 bp, Homo sapiens
cgctgctacacgcctggtggg

SEQ ID NO: 12202 - DNA, 19 bp, Homo sapiens
cgctgctgcggttcatagc

SEQ ID NO: 12203 - DNA, 20 bp, Homo sapiens
cgctgctgcggttcatagcc

SEQ ID NO: 12204 - DNA, 17 bp, Homo sapiens
cgctgctggagtacgag

SEQ ID NO: 12205 - DNA, 19 bp, Homo sapiens
cgctggaggagtggagcag

SEQ ID NO: 12206 - DNA, 17 bp, Homo sapiens
cgctggcgctgcccgga

SEQ ID NO: 12207 - DNA, 20 bp, Homo sapiens
cgctggcggcggagtcttcc

SEQ ID NO: 12208 - DNA, 19 bp, Homo sapiens
cgctggctaaaaaagggca

SEQ ID NO: 12209 - DNA, 19 bp, Homo sapiens
cgctgggcgctcagagcct

SEQ ID NO: 12210 - DNA, 16 bp, Homo sapiens
cgctgggcttgccggg

SEQ ID NO: 12211 - DNA, 22 bp, Homo sapiens
cgctggggacggtgggagcaga

SEQ ID NO: 12212 - DNA, 22 bp, Homo sapiens
cgctggggagcggacgctgcat

SEQ ID NO: 12213 - DNA, 20 bp, Homo sapiens
cgctggggtggcagagccgc

SEQ ID NO: 12214 - DNA, 18 bp, Homo sapiens
cgctgggtccgggagcag

SEQ ID NO: 12215 - DNA, 17 bp, Homo sapiens
cgctgtcactgttggtg

SEQ ID NO: 12216 - DNA, 18 bp, Homo sapiens
cgctgtcatggaggacgc

SEQ ID NO: 12217 - DNA, 18 bp, Homo sapiens
cgctgtggttgctgtccg

SEQ ID NO: 12218 - DNA, 24 bp, Homo sapiens
cgctgtggttgctgtttgcggtgg

SEQ ID NO: 12219 - DNA, 23 bp, Homo sapiens
cgctgttcagtgccggtgttgca

SEQ ID NO: 12220 - DNA, 18 bp, Homo sapiens
cgctgttcgtccgggttt

SEQ ID NO: 12221 - DNA, 20 bp, Homo sapiens
cgcttatgggcgctctaggc

SEQ ID NO: 12222 - DNA, 16 bp, Homo sapiens
cgcttcaggactaccg

SEQ ID NO: 12223 - DNA, 17 bp, Homo sapiens
cgcttccttcttctctt

SEQ ID NO: 12224 - DNA, 18 bp, Homo sapiens
cgcttccttcttctcttc

SEQ ID NO: 12225 - DNA, 18 bp, Homo sapiens
cgcttgcagcttgctagc

SEQ ID NO: 12226 - DNA, 20 bp, Homo sapiens
cgcttgcatctcttcgcctc

SEQ ID NO: 12227 - DNA, 17 bp, Homo sapiens
cgcttgccaccatggag

SEQ ID NO: 12228 - DNA, 18 bp, Homo sapiens
cgcttggtggccactggc

SEQ ID NO: 12229 - DNA, 18 bp, Homo sapiens
cgcttgtcccctgccagg

SEQ ID NO: 12230 - DNA, 16 bp, Homo sapiens
cgctttaggggaactg

SEQ ID NO: 12231 - DNA, 18 bp, Homo sapiens
cgctttctggaaggttcg

SEQ ID NO: 12232 - DNA, 18 bp, Homo sapiens
cggaaaagaggagaagag

SEQ ID NO: 12233 - DNA, 21 bp, Homo sapiens
cggaaaagaggagaagagcaa

SEQ ID NO: 12234 - DNA, 17 bp, Homo sapiens
cggaaaaggcttgggga

SEQ ID NO: 12235 - DNA, 19 bp, Homo sapiens
cggaaacgctgcgtggggg

SEQ ID NO: 12236 - DNA, 16 bp, Homo sapiens
cggaaagaacggatat

SEQ ID NO: 12237 - DNA, 18 bp, Homo sapiens
cggaaagcgcggtgggga

SEQ ID NO: 12238 - DNA, 20 bp, Homo sapiens
cggaaagcgcggtggggacg

SEQ ID NO: 12239 - DNA, 18 bp, Homo sapiens
cggaaaggaggcggggct

SEQ ID NO: 12240 - DNA, 20 bp, Homo sapiens
cggaaaggatggcgctgtga

SEQ ID NO: 12241 - DNA, 17 bp, Homo sapiens
cggaaagggagacgccg

SEQ ID NO: 12242 - DNA, 18 bp, Homo sapiens
cggaaagggagacgccgc

SEQ ID NO: 12243 - DNA, 22 bp, Homo sapiens
cggaaagggagacgccgccgct

SEQ ID NO: 12244 - DNA, 24 bp, Homo sapiens
cggaaaggtaggagccccccggcc

SEQ ID NO: 12245 - DNA, 18 bp, Homo sapiens
cggaaatgacgacaacgg

SEQ ID NO: 12246 - DNA, 19 bp, Homo sapiens
cggaaatggggtaggtgct

SEQ ID NO: 12247 - DNA, 19 bp, Homo sapiens
cggaaatggttgtggacta

SEQ ID NO: 12248 - DNA, 20 bp, Homo sapiens
cggaaatggttgtggactac

SEQ ID NO: 12249 - DNA, 18 bp, Homo sapiens
cggaacatggcggaagcg

SEQ ID NO: 12250 - DNA, 21 bp, Homo sapiens
taatgtaacagtttgcaaacc

SEQ ID NO: 12251 - DNA, 18 bp, Homo sapiens
taattgaggaaactgtgg

SEQ ID NO: 12252 - DNA, 18 bp, Homo sapiens
tacaatgaggcagccagc

SEQ ID NO: 12253 - DNA, 17 bp, Homo sapiens
tacactgaagagggagg

SEQ ID NO: 12254 - DNA, 18 bp, Homo sapiens
tacagctttggcgaggtc

SEQ ID NO: 12255 - DNA, 22 bp, Homo sapiens
tacaggaaactggctagaagac

SEQ ID NO: 12256 - DNA, 19 bp, Homo sapiens
tacaggcccgagtggaaga

SEQ ID NO: 12257 - DNA, 18 bp, Homo sapiens
tacaggttgcgggccttt

SEQ ID NO: 12258 - DNA, 19 bp, Homo sapiens
tacaggttgcgggcctttg

SEQ ID NO: 12259 - DNA, 20 bp, Homo sapiens
tacaggttgcgggcctttgt

SEQ ID NO: 12260 - DNA, 18 bp, Homo sapiens
tacagtggactacccgat

SEQ ID NO: 12261 - DNA, 20 bp, Homo sapiens
tacagttgagtaatctcaga

SEQ ID NO: 12262 - DNA, 23 bp, Homo sapiens
tacataactcgttgcgggctccg

SEQ ID NO: 12263 - DNA, 18 bp, Homo sapiens
taccagagtccctttctc

SEQ ID NO: 12264 - DNA, 18 bp, Homo sapiens
taccatgaggcgccggta

SEQ ID NO: 12265 - DNA, 16 bp, Homo sapiens
taccatggtctcggag

SEQ ID NO: 12266 - DNA, 17 bp, Homo sapiens
taccatggtctcggagg

SEQ ID NO: 12267 - DNA, 18 bp, Homo sapiens
taccatggtctcggaggt

SEQ ID NO: 12268 - DNA, 21 bp, Homo sapiens
tacccaagttggaggtagggg

SEQ ID NO: 12269 - DNA, 17 bp, Homo sapiens
tacccccggtcccagac

SEQ ID NO: 12270 - DNA, 18 bp, Homo sapiens
tacccctcgttaaaggca

SEQ ID NO: 12271 - DNA, 16 bp, Homo sapiens
taccgagtggcggctg

SEQ ID NO: 12272 - DNA, 19 bp, Homo sapiens
taccgggctggcagggcgg

SEQ ID NO: 12273 - DNA, 22 bp, Homo sapiens
taccggtgacccggctagccgg

SEQ ID NO: 12274 - DNA, 23 bp, Homo sapiens
taccggtgacccggctagccggc

SEQ ID NO: 12275 - DNA, 16 bp, Homo sapiens
tacctagtgggtcttg

SEQ ID NO: 12276 - DNA, 18 bp, Homo sapiens
tacgacgatcgggcctac

SEQ ID NO: 12277 - DNA, 20 bp, Homo sapiens
tacgacgatcgggcctacag

SEQ ID NO: 12278 - DNA, 18 bp, Homo sapiens
tacgatctgcttgttcat

SEQ ID NO: 12279 - DNA, 18 bp, Homo sapiens
tacgattgcggtgagacg

SEQ ID NO: 12280 - DNA, 22 bp, Homo sapiens
tacgcacacgagaacatgcctg

SEQ ID NO: 12281 - DNA, 20 bp, Homo sapiens
tacgccatgttggggtttgt

SEQ ID NO: 12282 - DNA, 21 bp, Homo sapiens
tacgccgagcccagctacgcg

SEQ ID NO: 12283 - DNA, 22 bp, Homo sapiens
tacgccgagcccagctacgcga

SEQ ID NO: 12284 - DNA, 17 bp, Homo sapiens
tacgctcgtcagccggt

SEQ ID NO: 12285 - DNA, 14 bp, Homo sapiens
tacgctgggcgcca

SEQ ID NO: 12286 - DNA, 17 bp, Homo sapiens
tacggccggagacggca

SEQ ID NO: 12287 - DNA, 23 bp, Homo sapiens
tacgtaccgggccgtgctgctta

SEQ ID NO: 12288 - DNA, 18 bp, Homo sapiens
tacgtccgtttgtccgga

SEQ ID NO: 12289 - DNA, 18 bp, Homo sapiens
tacgtcgtgcacacgtgg

SEQ ID NO: 12290 - DNA, 16 bp, Homo sapiens
tacgtgagtgccggac

SEQ ID NO: 12291 - DNA, 18 bp, Homo sapiens
tacgtggagacgaagatg

SEQ ID NO: 12292 - DNA, 17 bp, Homo sapiens
tactattgtgcggctgc

SEQ ID NO: 12293 - DNA, 17 bp, Homo sapiens
tactccgcgtgcgcttg

SEQ ID NO: 12294 - DNA, 20 bp, Homo sapiens
tactgctacctagtgggtct

SEQ ID NO: 12295 - DNA, 19 bp, Homo sapiens
tactgggaaggtgagggcg

SEQ ID NO: 12296 - DNA, 23 bp, Homo sapiens
tacttcacggatccgcttcaaag

SEQ ID NO: 12297 - DNA, 16 bp, Homo sapiens
tacttcgcggagctgg

SEQ ID NO: 12298 - DNA, 18 bp, Homo sapiens
tactttttagagcgactg

SEQ ID NO: 12299 - DNA, 18 bp, Homo sapiens
tagaaaagatggctgctg

SEQ ID NO: 12300 - DNA, 22 bp, Homo sapiens
tagaaactggggacatggcagc

SEQ ID NO: 12301 - DNA, 19 bp, Homo sapiens
tagaaagtggcagcccctc

SEQ ID NO: 12302 - DNA, 17 bp, Homo sapiens
tagaacgggcgacggcg

SEQ ID NO: 12303 - DNA, 17 bp, Homo sapiens
tagaagctgcactgggg

SEQ ID NO: 12304 - DNA, 18 bp, Homo sapiens
tagaaggagacctgcttc

SEQ ID NO: 12305 - DNA, 18 bp, Homo sapiens
tagaagggtgctgagatg

SEQ ID NO: 12306 - DNA, 17 bp, Homo sapiens
tagaagtcgggcggacc

SEQ ID NO: 12307 - DNA, 18 bp, Homo sapiens
cggaacccaagatggctg

SEQ ID NO: 12308 - DNA, 16 bp, Homo sapiens
cggaaccgacagcctc

SEQ ID NO: 12309 - DNA, 20 bp, Homo sapiens
cggaaccgagctgacgggcg

SEQ ID NO: 12310 - DNA, 22 bp, Homo sapiens
cggaaccgagctgacgggcgtg

SEQ ID NO: 12311 - DNA, 18 bp, Homo sapiens
cggaaccgtgaggactgc

SEQ ID NO: 12312 - DNA, 18 bp, Homo sapiens
cggaacgagactgcacgg

SEQ ID NO: 12313 - DNA, 22 bp, Homo sapiens
cggaacgagactgcacggtgag

SEQ ID NO: 12314 - DNA, 19 bp, Homo sapiens
cggaacgcgcgcaccgcag

SEQ ID NO: 12315 - DNA, 18 bp, Homo sapiens
cggaacggcctctggtga

SEQ ID NO: 12316 - DNA, 16 bp, Homo sapiens
cggaacgtgatgccgc

SEQ ID NO: 12317 - DNA, 19 bp, Homo sapiens
cggaactaaaggtaaagcg

SEQ ID NO: 12318 - DNA, 19 bp, Homo sapiens
cggaactctgaggtgaggg

SEQ ID NO: 12319 - DNA, 18 bp, Homo sapiens
cggaagagttatagaccg

SEQ ID NO: 12320 - DNA, 20 bp, Homo sapiens
cggaagatggctgacgactc

SEQ ID NO: 12321 - DNA, 17 bp, Homo sapiens
cggaagcaagtgaaatg

SEQ ID NO: 12322 - DNA, 20 bp, Homo sapiens
cggaagcggaagtgcctcag

SEQ ID NO: 12323 - DNA, 16 bp, Homo sapiens
cggaagcggacccccc

SEQ ID NO: 12324 - DNA, 17 bp, Homo sapiens
cggaagcggagagcggc

SEQ ID NO: 12325 - DNA, 20 bp, Homo sapiens
cggaagcggagagcggctga

SEQ ID NO: 12326 - DNA, 17 bp, Homo sapiens
cggaagcggagtgagtg

SEQ ID NO: 12327 - DNA, 18 bp, Homo sapiens
cggaagcggagtgagtga

SEQ ID NO: 12328 - DNA, 16 bp, Homo sapiens
cggaagcgggcctggg

SEQ ID NO: 12329 - DNA, 18 bp, Homo sapiens
cggaagcgggcggcgcta

SEQ ID NO: 12330 - DNA, 19 bp, Homo sapiens
cggaagctacagctacctc

SEQ ID NO: 12331 - DNA, 18 bp, Homo sapiens
cggaaggagaagatgtgc

SEQ ID NO: 12332 - DNA, 18 bp, Homo sapiens
cggaaggagcatggcgtg

SEQ ID NO: 12333 - DNA, 17 bp, Homo sapiens
cggaaggagctagacgg

SEQ ID NO: 12334 - DNA, 18 bp, Homo sapiens
cggaaggagctagacggc

SEQ ID NO: 12335 - DNA, 19 bp, Homo sapiens
cggaaggcacgcggaacct

SEQ ID NO: 12336 - DNA, 20 bp, Homo sapiens
cggaaggcggacgactagag

SEQ ID NO: 12337 - DNA, 18 bp, Homo sapiens
cggaagggtgagtctgga

SEQ ID NO: 12338 - DNA, 19 bp, Homo sapiens
cggaaggtacggtggggat

SEQ ID NO: 12339 - DNA, 20 bp, Homo sapiens
cggaaggtacggtggggata

SEQ ID NO: 12340 - DNA, 20 bp, Homo sapiens
cggaagtaccgcgagcaagg

SEQ ID NO: 12341 - DNA, 22 bp, Homo sapiens
cggaagtagccgcaggcatggc

SEQ ID NO: 12342 - DNA, 17 bp, Homo sapiens
cggaagtaggagaggag

SEQ ID NO: 12343 - DNA, 18 bp, Homo sapiens
cggaagtaggagaggagt

SEQ ID NO: 12344 - DNA, 19 bp, Homo sapiens
cggaagtaggagaggagtt

SEQ ID NO: 12345 - DNA, 18 bp, Homo sapiens
cggaagtgaggcaccctc

SEQ ID NO: 12346 - DNA, 18 bp, Homo sapiens
cggaagtggaggaaagat

SEQ ID NO: 12347 - DNA, 18 bp, Homo sapiens
cggaagtggaggagcggc

SEQ ID NO: 12348 - DNA, 18 bp, Homo sapiens
cggaagtggcagttggcg

SEQ ID NO: 12349 - DNA, 18 bp, Homo sapiens
cggaagtggcccctcgcg

SEQ ID NO: 12350 - DNA, 18 bp, Homo sapiens
cggaagtgggaagagaga

SEQ ID NO: 12351 - DNA, 17 bp, Homo sapiens
cggaagtggttctccgc

SEQ ID NO: 12352 - DNA, 18 bp, Homo sapiens
cggaagtgtaggttacgg

SEQ ID NO: 12353 - DNA, 24 bp, Homo sapiens
cggaagtgtggcttcgtttacagt

SEQ ID NO: 12354 - DNA, 20 bp, Homo sapiens
cggaagttctttcccggcct

SEQ ID NO: 12355 - DNA, 18 bp, Homo sapiens
cggaagtttcctcagtga

SEQ ID NO: 12356 - DNA, 15 bp, Homo sapiens
cggaagttttgctgc

SEQ ID NO: 12357 - DNA, 17 bp, Homo sapiens
cggaataggcggagctt

SEQ ID NO: 12358 - DNA, 18 bp, Homo sapiens
cggaatccttgactctag

SEQ ID NO: 12359 - DNA, 18 bp, Homo sapiens
cggaatcgcccccgaggc

SEQ ID NO: 12360 - DNA, 17 bp, Homo sapiens
cggaatcgcggaaaccg

SEQ ID NO: 12361 - DNA, 18 bp, Homo sapiens
cggaatctccgacttgcc

SEQ ID NO: 12362 - DNA, 18 bp, Homo sapiens
cggacaagaaaggggctg

SEQ ID NO: 12363 - DNA, 20 bp, Homo sapiens
cggacaagaaaggggctgtg

SEQ ID NO: 12364 - DNA, 18 bp, Homo sapiens
tagaagtcgggcggaccc

SEQ ID NO: 12365 - DNA, 21 bp, Homo sapiens
tagaatcttcccagtaggcgg

SEQ ID NO: 12366 - DNA, 18 bp, Homo sapiens
tagaccacgggttgcagc

SEQ ID NO: 12367 - DNA, 18 bp, Homo sapiens
tagacgagcggccccggg

SEQ ID NO: 12368 - DNA, 16 bp, Homo sapiens
tagacggaggaggctg

SEQ ID NO: 12369 - DNA, 18 bp, Homo sapiens
tagacgggagggagaacg

SEQ ID NO: 12370 - DNA, 23 bp, Homo sapiens
tagactgttgggtaggctgcgtg

SEQ ID NO: 12371 - DNA, 21 bp, Homo sapiens
tagagaaacaagcggagttaa

SEQ ID NO: 12372 - DNA, 19 bp, Homo sapiens
tagagagtggggacgtccg

SEQ ID NO: 12373 - DNA, 17 bp, Homo sapiens
tagaggaaacatggccg

SEQ ID NO: 12374 - DNA, 17 bp, Homo sapiens
tagagggaaggaaaggg

SEQ ID NO: 12375 - DNA, 18 bp, Homo sapiens
tagagtccgggtagtgag

SEQ ID NO: 12376 - DNA, 18 bp, Homo sapiens
tagagtttcttccctgcc

SEQ ID NO: 12377 - DNA, 20 bp, Homo sapiens
tagatgatgtggtgggtttg

SEQ ID NO: 12378 - DNA, 19 bp, Homo sapiens
tagatgctggagaccagca

SEQ ID NO: 12379 - DNA, 18 bp, Homo sapiens
tagcagaggacgcggcca

SEQ ID NO: 12380 - DNA, 18 bp, Homo sapiens
tagcagcagcgccgggtc

SEQ ID NO: 12381 - DNA, 16 bp, Homo sapiens
tagcagtggcaacggc

SEQ ID NO: 12382 - DNA, 21 bp, Homo sapiens
tagcatgcctgagccagcgaa

SEQ ID NO: 12383 - DNA, 20 bp, Homo sapiens
tagccacctgaggtggggct

SEQ ID NO: 12384 - DNA, 20 bp, Homo sapiens
tagccctgctttccgcctca

SEQ ID NO: 12385 - DNA, 19 bp, Homo sapiens
tagccgcccgtctttgtaa

SEQ ID NO: 12386 - DNA, 23 bp, Homo sapiens
tagccgcccgtctttgtaaggag

SEQ ID NO: 12387 - DNA, 15 bp, Homo sapiens
tagccggagccgggg

SEQ ID NO: 12388 - DNA, 16 bp, Homo sapiens
tagccggaggtcggag

SEQ ID NO: 12389 - DNA, 21 bp, Homo sapiens
tagccggccgggcctgggaac

SEQ ID NO: 12390 - DNA, 17 bp, Homo sapiens
tagcctgttggaccttc

SEQ ID NO: 12391 - DNA, 19 bp, Homo sapiens
tagccttgcttttctcctt

SEQ ID NO: 12392 - DNA, 18 bp, Homo sapiens
tagcgaagagagtttggc

SEQ ID NO: 12393 - DNA, 18 bp, Homo sapiens
tagcgaccaattgtcata

SEQ ID NO: 12394 - DNA, 19 bp, Homo sapiens
tagcgacggccgtagggag

SEQ ID NO: 12395 - DNA, 18 bp, Homo sapiens
tagcgagagactgggccg

SEQ ID NO: 12396 - DNA, 20 bp, Homo sapiens
tagcgagagactgggccgcg

SEQ ID NO: 12397 - DNA, 18 bp, Homo sapiens
tagcgcggggcggggcca

SEQ ID NO: 12398 - DNA, 20 bp, Homo sapiens
tagcgcgtaacgagagactg

SEQ ID NO: 12399 - DNA, 19 bp, Homo sapiens
tagcgcttgcagcatggtg

SEQ ID NO: 12400 - DNA, 18 bp, Homo sapiens
tagcggcagccggatcgc

SEQ ID NO: 12401 - DNA, 23 bp, Homo sapiens
tagcggcagtagcagcagcgccg

SEQ ID NO: 12402 - DNA, 18 bp, Homo sapiens
tagcggcggcgggaaatc

SEQ ID NO: 12403 - DNA, 18 bp, Homo sapiens
tagcgggcagttggccgg

SEQ ID NO: 12404 - DNA, 16 bp, Homo sapiens
tagcggtcgaggcttt

SEQ ID NO: 12405 - DNA, 19 bp, Homo sapiens
tagcggtggatcactcggc

SEQ ID NO: 12406 - DNA, 21 bp, Homo sapiens
tagcgtcagcagcgccgcagc

SEQ ID NO: 12407 - DNA, 18 bp, Homo sapiens
tagcgttaaccggcgggg

SEQ ID NO: 12408 - DNA, 21 bp, Homo sapiens
tagctctgaaggcatggcgcg

SEQ ID NO: 12409 - DNA, 22 bp, Homo sapiens
tagctctttcctttcctccaca

SEQ ID NO: 12410 - DNA, 18 bp, Homo sapiens
tagctgtactgtgtggcg

SEQ ID NO: 12411 - DNA, 19 bp, Homo sapiens
tagctttctcaactatggc

SEQ ID NO: 12412 - DNA, 20 bp, Homo sapiens
tagctttctcaactatggcc

SEQ ID NO: 12413 - DNA, 18 bp, Homo sapiens
tagctttctcccgaacgc

SEQ ID NO: 12414 - DNA, 19 bp, Homo sapiens
tagctttctcccgaacgcc

SEQ ID NO: 12415 - DNA, 17 bp, Homo sapiens
taggaaattgttagaaa

SEQ ID NO: 12416 - DNA, 18 bp, Homo sapiens
taggaggcgctggctctt

SEQ ID NO: 12417 - DNA, 19 bp, Homo sapiens
taggaggcggcctcgaggg

SEQ ID NO: 12418 - DNA, 18 bp, Homo sapiens
taggcactgctgagctgg

SEQ ID NO: 12419 - DNA, 21 bp, Homo sapiens
taggccagtgccggggtttaa

SEQ ID NO: 12420 - DNA, 16 bp, Homo sapiens
taggccctgaggaccc

SEQ ID NO: 12421 - DNA, 21 bp, Homo sapiens
cggacaagggcaacgagcgtt

SEQ ID NO: 12422 - DNA, 20 bp, Homo sapiens
cggacaccaggcaggcccgg

SEQ ID NO: 12423 - DNA, 19 bp, Homo sapiens
cggacaccatgcagtcgga

SEQ ID NO: 12424 - DNA, 18 bp, Homo sapiens
cggacacggaacagggaa

SEQ ID NO: 12425 - DNA, 16 bp, Homo sapiens
cggacagacaggcgag

SEQ ID NO: 12426 - DNA, 17 bp, Homo sapiens
cggacagagcggtagcg

SEQ ID NO: 12427 - DNA, 18 bp, Homo sapiens
cggacagagcggtagcgc

SEQ ID NO: 12428 - DNA, 18 bp, Homo sapiens
cggacagctgggccaggg

SEQ ID NO: 12429 - DNA, 18 bp, Homo sapiens
cggacaggaagaggctct

SEQ ID NO: 12430 - DNA, 20 bp, Homo sapiens
cggacaggaggcagtgccgc

SEQ ID NO: 12431 - DNA, 16 bp, Homo sapiens
cggacatggcgcacgc

SEQ ID NO: 12432 - DNA, 18 bp, Homo sapiens
cggaccagccgctgcggg

SEQ ID NO: 12433 - DNA, 19 bp, Homo sapiens
cggacccaggatggcggag

SEQ ID NO: 12434 - DNA, 18 bp, Homo sapiens
cggaccctgtagagtcgg

SEQ ID NO: 12435 - DNA, 19 bp, Homo sapiens
cggaccgagaccggagatg

SEQ ID NO: 12436 - DNA, 18 bp, Homo sapiens
cggaccgaggcgagatgg

SEQ ID NO: 12437 - DNA, 19 bp, Homo sapiens
cggaccgaggcgagatggc

SEQ ID NO: 12438 - DNA, 17 bp, Homo sapiens
cggaccggacagagacg

SEQ ID NO: 12439 - DNA, 19 bp, Homo sapiens
cggaccggctgcagtctca

SEQ ID NO: 12440 - DNA, 17 bp, Homo sapiens
cggacctcgcgcggacg

SEQ ID NO: 12441 - DNA, 17 bp, Homo sapiens
cggacctgcggcgaccg

SEQ ID NO: 12442 - DNA, 19 bp, Homo sapiens
cggacgaaagacacgggcc

SEQ ID NO: 12443 - DNA, 19 bp, Homo sapiens
cggacgagagtgagacagc

SEQ ID NO: 12444 - DNA, 17 bp, Homo sapiens
cggacgcgaagcagaag

SEQ ID NO: 12445 - DNA, 16 bp, Homo sapiens
cggacgcgaggcgacg

SEQ ID NO: 12446 - DNA, 18 bp, Homo sapiens
cggacgcggaacccggcg

SEQ ID NO: 12447 - DNA, 18 bp, Homo sapiens
cggacgcggagcgagagg

SEQ ID NO: 12448 - DNA, 14 bp, Homo sapiens
cggacgcggggaac

SEQ ID NO: 12449 - DNA, 16 bp, Homo sapiens
cggacgctgcatcccc

SEQ ID NO: 12450 - DNA, 20 bp, Homo sapiens
cggacgcttcggccgtaacg

SEQ ID NO: 12451 - DNA, 16 bp, Homo sapiens
cggacggaaagggaga

SEQ ID NO: 12452 - DNA, 17 bp, Homo sapiens
cggacggaaagggagac

SEQ ID NO: 12453 - DNA, 19 bp, Homo sapiens
cggacggaaagggagacgc

SEQ ID NO: 12454 - DNA, 19 bp, Homo sapiens
cggacggaaggctgaggcg

SEQ ID NO: 12455 - DNA, 18 bp, Homo sapiens
cggacggaggcagccgcg

SEQ ID NO: 12456 - DNA, 18 bp, Homo sapiens
cggacggagggtggaggg

SEQ ID NO: 12457 - DNA, 17 bp, Homo sapiens
cggacggcaaagaacgc

SEQ ID NO: 12458 - DNA, 16 bp, Homo sapiens
cggacggcgaatggag

SEQ ID NO: 12459 - DNA, 18 bp, Homo sapiens
cggacggcgctagctgca

SEQ ID NO: 12460 - DNA, 18 bp, Homo sapiens
cggacggcggcgggagcg

SEQ ID NO: 12461 - DNA, 18 bp, Homo sapiens
cggacggcgtggagtgac

SEQ ID NO: 12462 - DNA, 16 bp, Homo sapiens
cggacgggcgcggaga

SEQ ID NO: 12463 - DNA, 20 bp, Homo sapiens
cggacgggcgcggagacgct

SEQ ID NO: 12464 - DNA, 23 bp, Homo sapiens
cggacggtggacgctgggacgcg

SEQ ID NO: 12465 - DNA, 20 bp, Homo sapiens
cggacgtgggggcggcagcc

SEQ ID NO: 12466 - DNA, 18 bp, Homo sapiens
cggactaccgttggtttc

SEQ ID NO: 12467 - DNA, 18 bp, Homo sapiens
cggactacgccatgttgg

SEQ ID NO: 12468 - DNA, 18 bp, Homo sapiens
cggactaggacccgcggc

SEQ ID NO: 12469 - DNA, 21 bp, Homo sapiens
cggactcaagatggcggcgtg

SEQ ID NO: 12470 - DNA, 18 bp, Homo sapiens
cggactcgaacgcagttg

SEQ ID NO: 12471 - DNA, 19 bp, Homo sapiens
cggactcgaacgcagttgc

SEQ ID NO: 12472 - DNA, 18 bp, Homo sapiens
cggactcggggttggatg

SEQ ID NO: 12473 - DNA, 18 bp, Homo sapiens
cggactcggtgcggtctc

SEQ ID NO: 12474 - DNA, 18 bp, Homo sapiens
cggactgccctttcccaa

SEQ ID NO: 12475 - DNA, 18 bp, Homo sapiens
cggactgcggaaggatgg

SEQ ID NO: 12476 - DNA, 18 bp, Homo sapiens
cggactggagggagacaa

SEQ ID NO: 12477 - DNA, 17 bp, Homo sapiens
cggactggccggtagcg

SEQ ID NO: 12478 - DNA, 18 bp, Homo sapiens
taggccggcgcctgccgg

SEQ ID NO: 12479 - DNA, 20 bp, Homo sapiens
taggccggtgctggtggccc

SEQ ID NO: 12480 - DNA, 17 bp, Homo sapiens
taggcgatagagatcca

SEQ ID NO: 12481 - DNA, 17 bp, Homo sapiens
taggcggagcgaagaga

SEQ ID NO: 12482 - DNA, 18 bp, Homo sapiens
taggcggagcgaagagaa

SEQ ID NO: 12483 - DNA, 18 bp, Homo sapiens
taggcgtgcgaggagggg

SEQ ID NO: 12484 - DNA, 18 bp, Homo sapiens
taggctccgcggcctcca

SEQ ID NO: 12485 - DNA, 22 bp, Homo sapiens
taggctgccgcccagcgccctc

SEQ ID NO: 12486 - DNA, 19 bp, Homo sapiens
taggctgggctcgggcagg

SEQ ID NO: 12487 - DNA, 18 bp, Homo sapiens
taggcttctgggagcgac

SEQ ID NO: 12488 - DNA, 18 bp, Homo sapiens
tagggaaggcagaaagta

SEQ ID NO: 12489 - DNA, 20 bp, Homo sapiens
tagggacacttcggtcctga

SEQ ID NO: 12490 - DNA, 21 bp, Homo sapiens
tagggcacaccctgagggtag

SEQ ID NO: 12491 - DNA, 20 bp, Homo sapiens
tagggcggcgagcggccggg

SEQ ID NO: 12492 - DNA, 18 bp, Homo sapiens
taggggaggcgggtcggc

SEQ ID NO: 12493 - DNA, 21 bp, Homo sapiens
taggggggggcggaggcgggg

SEQ ID NO: 12494 - DNA, 18 bp, Homo sapiens
tagggtgcagggaacctc

SEQ ID NO: 12495 - DNA, 18 bp, Homo sapiens
taggtaggaggaggagtt

SEQ ID NO: 12496 - DNA, 15 bp, Homo sapiens
taggtcccggcaacc

SEQ ID NO: 12497 - DNA, 19 bp, Homo sapiens
taggtccgttggtcggtcg

SEQ ID NO: 12498 - DNA, 18 bp, Homo sapiens
taggtcggctggaaatta

SEQ ID NO: 12499 - DNA, 19 bp, Homo sapiens
taggtgagtgtggcatcct

SEQ ID NO: 12500 - DNA, 18 bp, Homo sapiens
taggttcgagacggtgga

SEQ ID NO: 12501 - DNA, 17 bp, Homo sapiens
taggttgggagtggaag

SEQ ID NO: 12502 - DNA, 18 bp, Homo sapiens
tagtaaataatctcggaa

SEQ ID NO: 12503 - DNA, 18 bp, Homo sapiens
tagtaacggccgcatggt

SEQ ID NO: 12504 - DNA, 16 bp, Homo sapiens
tagtacccgagctcat

SEQ ID NO: 12505 - DNA, 17 bp, Homo sapiens
tagtagcctggctttgc

SEQ ID NO: 12506 - DNA, 17 bp, Homo sapiens
tagtcatggccgccttc

SEQ ID NO: 12507 - DNA, 18 bp, Homo sapiens
tagtcatggccgccttcc

SEQ ID NO: 12508 - DNA, 22 bp, Homo sapiens
tagtccaacatggcggcgccca

SEQ ID NO: 12509 - DNA, 18 bp, Homo sapiens
tagtccctcagtgcgcat

SEQ ID NO: 12510 - DNA, 20 bp, Homo sapiens
tagtccctcagtgcgcatcc

SEQ ID NO: 12511 - DNA, 18 bp, Homo sapiens
tagtccgagtggagagag

SEQ ID NO: 12512 - DNA, 18 bp, Homo sapiens
tagtcgggtaggcatagg

SEQ ID NO: 12513 - DNA, 18 bp, Homo sapiens
tagtctgaggcgaagctt

SEQ ID NO: 12514 - DNA, 18 bp, Homo sapiens
tagtgagtcgcggcgccg

SEQ ID NO: 12515 - DNA, 18 bp, Homo sapiens
tagtgccgccgggactct

SEQ ID NO: 12516 - DNA, 18 bp, Homo sapiens
tagtgcgggtagtgggtt

SEQ ID NO: 12517 - DNA, 16 bp, Homo sapiens
tagtgggctgggccgg

SEQ ID NO: 12518 - DNA, 19 bp, Homo sapiens
tagttcccaggctttggcc

SEQ ID NO: 12519 - DNA, 18 bp, Homo sapiens
tagttcgccttcaacatg

SEQ ID NO: 12520 - DNA, 18 bp, Homo sapiens
tagttttgctgccgggag

SEQ ID NO: 12521 - DNA, 18 bp, Homo sapiens
tataaaccctgagatatg

SEQ ID NO: 12522 - DNA, 18 bp, Homo sapiens
tatagaagtcgggcggac

SEQ ID NO: 12523 - DNA, 17 bp, Homo sapiens
tatagataataggcctt

SEQ ID NO: 12524 - DNA, 21 bp, Homo sapiens
tataggcgcatggaaggttcc

SEQ ID NO: 12525 - DNA, 18 bp, Homo sapiens
tatcaggaagattgtgca

SEQ ID NO: 12526 - DNA, 17 bp, Homo sapiens
tatcctccgggtccctc

SEQ ID NO: 12527 - DNA, 18 bp, Homo sapiens
tatcctcgccaaggactt

SEQ ID NO: 12528 - DNA, 18 bp, Homo sapiens
tatcgagagggacgacgg

SEQ ID NO: 12529 - DNA, 18 bp, Homo sapiens
tatctttctagacaaggc

SEQ ID NO: 12530 - DNA, 19 bp, Homo sapiens
tatctttctagacaaggca

SEQ ID NO: 12531 - DNA, 19 bp, Homo sapiens
tatgactcaagcccgggtt

SEQ ID NO: 12532 - DNA, 17 bp, Homo sapiens
tatggaggtagggcggg

SEQ ID NO: 12533 - DNA, 24 bp, Homo sapiens
tatggagtccgtcagttgctccgc

SEQ ID NO: 12534 - DNA, 21 bp, Homo sapiens
tatggcggcggcagccgaggg

SEQ ID NO: 12535 - DNA, 17 bp, Homo sapiens
cggactggtcatacggc

SEQ ID NO: 12536 - DNA, 19 bp, Homo sapiens
cggacttcgagccatggcg

SEQ ID NO: 12537 - DNA, 19 bp, Homo sapiens
cggagaaagtccatgggag

SEQ ID NO: 12538 - DNA, 19 bp, Homo sapiens
cggagaacgacggcgccgc

SEQ ID NO: 12539 - DNA, 18 bp, Homo sapiens
cggagaagactcaaaaga

SEQ ID NO: 12540 - DNA, 18 bp, Homo sapiens
cggagaaggacaggacaa

SEQ ID NO: 12541 - DNA, 18 bp, Homo sapiens
cggagacaaagatggctg

SEQ ID NO: 12542 - DNA, 16 bp, Homo sapiens
cggagacaggtaaccg

SEQ ID NO: 12543 - DNA, 18 bp, Homo sapiens
cggagacaggtaaccgtg

SEQ ID NO: 12544 - DNA, 18 bp, Homo sapiens
cggagacgccgctgccgc

SEQ ID NO: 12545 - DNA, 18 bp, Homo sapiens
cggagacgtaggagtggg

SEQ ID NO: 12546 - DNA, 20 bp, Homo sapiens
cggagacgtaggagtgggtc

SEQ ID NO: 12547 - DNA, 22 bp, Homo sapiens
cggagacgtaggagtgggtctt

SEQ ID NO: 12548 - DNA, 17 bp, Homo sapiens
cggagactgcccaggtg

SEQ ID NO: 12549 - DNA, 19 bp, Homo sapiens
cggagagacctggctgctg

SEQ ID NO: 12550 - DNA, 16 bp, Homo sapiens
cggagagactgcgggt

SEQ ID NO: 12551 - DNA, 16 bp, Homo sapiens
cggagagccccggcgc

SEQ ID NO: 12552 - DNA, 17 bp, Homo sapiens
cggagagcggctgatcg

SEQ ID NO: 12553 - DNA, 18 bp, Homo sapiens
cggagagcggctgatcgc

SEQ ID NO: 12554 - DNA, 19 bp, Homo sapiens
cggagagcggctgatcgca

SEQ ID NO: 12555 - DNA, 21 bp, Homo sapiens
cggagagctgagcagtcaaga

SEQ ID NO: 12556 - DNA, 18 bp, Homo sapiens
cggagaggacgagaccgg

SEQ ID NO: 12557 - DNA, 18 bp, Homo sapiens
cggagaggacgccaggac

SEQ ID NO: 12558 - DNA, 24 bp, Homo sapiens
cggagaggcagagacccaggggag

SEQ ID NO: 12559 - DNA, 16 bp, Homo sapiens
cggagatggtctgagg

SEQ ID NO: 12560 - DNA, 18 bp, Homo sapiens
cggagatgtggcgaccgg

SEQ ID NO: 12561 - DNA, 20 bp, Homo sapiens
cggagatgtggcgaccggtg

SEQ ID NO: 12562 - DNA, 22 bp, Homo sapiens
cggagatgtggcgaccggtgag

SEQ ID NO: 12563 - DNA, 16 bp, Homo sapiens
cggagcaagcggagct

SEQ ID NO: 12564 - DNA, 18 bp, Homo sapiens
cggagcactacaggttgc

SEQ ID NO: 12565 - DNA, 18 bp, Homo sapiens
cggagcactgcaggcgcc

SEQ ID NO: 12566 - DNA, 18 bp, Homo sapiens
cggagcagccgcagcctg

SEQ ID NO: 12567 - DNA, 18 bp, Homo sapiens
cggagcatggcggacccc

SEQ ID NO: 12568 - DNA, 24 bp, Homo sapiens
cggagccaagggagtccaggctgc

SEQ ID NO: 12569 - DNA, 18 bp, Homo sapiens
cggagcccagtgcccgag

SEQ ID NO: 12570 - DNA, 21 bp, Homo sapiens
cggagcccggctcccgcacca

SEQ ID NO: 12571 - DNA, 21 bp, Homo sapiens
cggagccggcctgagcagcgc

SEQ ID NO: 12572 - DNA, 16 bp, Homo sapiens
cggagccgtcggcgtg

SEQ ID NO: 12573 - DNA, 19 bp, Homo sapiens
cggagcctacggtccctgc

SEQ ID NO: 12574 - DNA, 18 bp, Homo sapiens
cggagcctggagagaagg

SEQ ID NO: 12575 - DNA, 20 bp, Homo sapiens
cggagcctgtggggaagcgg

SEQ ID NO: 12576 - DNA, 18 bp, Homo sapiens
cggagcgaagagaaccgg

SEQ ID NO: 12577 - DNA, 18 bp, Homo sapiens
cggagcgaagcggctggc

SEQ ID NO: 12578 - DNA, 17 bp, Homo sapiens
cggagcgagaggctgag

SEQ ID NO: 12579 - DNA, 17 bp, Homo sapiens
cggagcgaggagacccg

SEQ ID NO: 12580 - DNA, 17 bp, Homo sapiens
cggagcgaggtggcgag

SEQ ID NO: 12581 - DNA, 17 bp, Homo sapiens
cggagcgcggcgcggcg

SEQ ID NO: 12582 - DNA, 19 bp, Homo sapiens
cggagcgcggcggcaagat

SEQ ID NO: 12583 - DNA, 21 bp, Homo sapiens
cggagcgcgggcgcggcgcac

SEQ ID NO: 12584 - DNA, 18 bp, Homo sapiens
cggagcgcggtgaagctc

SEQ ID NO: 12585 - DNA, 20 bp, Homo sapiens
cggagcggacgccatggcga

SEQ ID NO: 12586 - DNA, 16 bp, Homo sapiens
cggagcggacggacgc

SEQ ID NO: 12587 - DNA, 19 bp, Homo sapiens
cggagcggagctgcccccg

SEQ ID NO: 12588 - DNA, 18 bp, Homo sapiens
cggagcggaggagacgaa

SEQ ID NO: 12589 - DNA, 19 bp, Homo sapiens
cggagcggcgcggagcatg

SEQ ID NO: 12590 - DNA, 18 bp, Homo sapiens
cggagcggcggcgggcgc

SEQ ID NO: 12591 - DNA, 17 bp, Homo sapiens
cggagcggctgtagcct

SEQ ID NO: 12592 - DNA, 22 bp, Homo sapiens
tatggcggcgtctgcgtctgca

SEQ ID NO: 12593 - DNA, 17 bp, Homo sapiens
tatggcgtcgctcaccg

SEQ ID NO: 12594 - DNA, 18 bp, Homo sapiens
tatgggggaactgatggc

SEQ ID NO: 12595 - DNA, 19 bp, Homo sapiens
tatgggggaactgatggcg

SEQ ID NO: 12596 - DNA, 21 bp, Homo sapiens
tatggttttcctcgcgttctt

SEQ ID NO: 12597 - DNA, 16 bp, Homo sapiens
tattagggctctggtg

SEQ ID NO: 12598 - DNA, 18 bp, Homo sapiens
tattgaagagagcgagcg

SEQ ID NO: 12599 - DNA, 18 bp, Homo sapiens
tattgctggcggcctgag

SEQ ID NO: 12600 - DNA, 16 bp, Homo sapiens
tatttcaaggcgcgcg

SEQ ID NO: 12601 - DNA, 18 bp, Homo sapiens
tatttgagtgggcggtgg

SEQ ID NO: 12602 - DNA, 23 bp, Homo sapiens
tatttgtagagaatcactgatcc

SEQ ID NO: 12603 - DNA, 21 bp, Homo sapiens
tattttgttgcgaggttctga

SEQ ID NO: 12604 - DNA, 17 bp, Homo sapiens
tcaaacatggcggcggc

SEQ ID NO: 12605 - DNA, 18 bp, Homo sapiens
tcaaagatggcggttgta

SEQ ID NO: 12606 - DNA, 16 bp, Homo sapiens
tcaaatgcagtcggct

SEQ ID NO: 12607 - DNA, 16 bp, Homo sapiens
tcaagatggcggcgtg

SEQ ID NO: 12608 - DNA, 17 bp, Homo sapiens
tcaagatggcggcgtgt

SEQ ID NO: 12609 - DNA, 18 bp, Homo sapiens
tcaagatggcggcgtgtg

SEQ ID NO: 12610 - DNA, 21 bp, Homo sapiens
tcaagggcgagagtgagtacc

SEQ ID NO: 12611 - DNA, 17 bp, Homo sapiens
tcaatatcgcgggacgg

SEQ ID NO: 12612 - DNA, 18 bp, Homo sapiens
tcaatcggcactggggtg

SEQ ID NO: 12613 - DNA, 23 bp, Homo sapiens
tcaatgtcagtggtactgaggca

SEQ ID NO: 12614 - DNA, 18 bp, Homo sapiens
tcacccgcactgagtcaa

SEQ ID NO: 12615 - DNA, 16 bp, Homo sapiens
tcacccggatggcggc

SEQ ID NO: 12616 - DNA, 21 bp, Homo sapiens
tcaccgaaaagtgctgcggga

SEQ ID NO: 12617 - DNA, 20 bp, Homo sapiens
tcaccgcccccggagcggcg

SEQ ID NO: 12618 - DNA, 18 bp, Homo sapiens
tcaccgcgcgcccctcct

SEQ ID NO: 12619 - DNA, 18 bp, Homo sapiens
tcaccgcggttcctgggc

SEQ ID NO: 12620 - DNA, 18 bp, Homo sapiens
tcaccgggtgaggaccgg

SEQ ID NO: 12621 - DNA, 19 bp, Homo sapiens
tcacggcgaaatgagactg

SEQ ID NO: 12622 - DNA, 18 bp, Homo sapiens
tcactcgttgagcaggtc

SEQ ID NO: 12623 - DNA, 18 bp, Homo sapiens
tcactgagccagggagca

SEQ ID NO: 12624 - DNA, 17 bp, Homo sapiens
tcactgctaggggctta

SEQ ID NO: 12625 - DNA, 20 bp, Homo sapiens
tcactgtccttccagcaggc

SEQ ID NO: 12626 - DNA, 21 bp, Homo sapiens
tcactgtccttccagcaggca

SEQ ID NO: 12627 - DNA, 17 bp, Homo sapiens
tcactgtgcggcgggga

SEQ ID NO: 12628 - DNA, 21 bp, Homo sapiens
tcacttccctcaacccttccc

SEQ ID NO: 12629 - DNA, 17 bp, Homo sapiens
tcacttccgcttccttc

SEQ ID NO: 12630 - DNA, 24 bp, Homo sapiens
tcacttgtctggagcttgaagaag

SEQ ID NO: 12631 - DNA, 24 bp, Homo sapiens
tcactttaggatctaccataccca

SEQ ID NO: 12632 - DNA, 19 bp, Homo sapiens
tcactttctgacttaggcc

SEQ ID NO: 12633 - DNA, 20 bp, Homo sapiens
tcagaactcaggcgtactgc

SEQ ID NO: 12634 - DNA, 17 bp, Homo sapiens
tcagaagggagctgctg

SEQ ID NO: 12635 - DNA, 20 bp, Homo sapiens
tcagacacgccttagcgcca

SEQ ID NO: 12636 - DNA, 18 bp, Homo sapiens
tcagacagtgcaggacga

SEQ ID NO: 12637 - DNA, 20 bp, Homo sapiens
tcagacagtgcaggacgaga

SEQ ID NO: 12638 - DNA, 18 bp, Homo sapiens
tcagacgccggagacgta

SEQ ID NO: 12639 - DNA, 21 bp, Homo sapiens
tcagactcagactcacgtcgc

SEQ ID NO: 12640 - DNA, 18 bp, Homo sapiens
tcagacttcagaaggaca

SEQ ID NO: 12641 - DNA, 19 bp, Homo sapiens
tcagacttcagaaggacac

SEQ ID NO: 12642 - DNA, 17 bp, Homo sapiens
tcagagaagggaaacac

SEQ ID NO: 12643 - DNA, 18 bp, Homo sapiens
tcagagaagggaaacaca

SEQ ID NO: 12644 - DNA, 18 bp, Homo sapiens
tcagagctggaacctgag

SEQ ID NO: 12645 - DNA, 19 bp, Homo sapiens
tcagagctggaacctgagg

SEQ ID NO: 12646 - DNA, 19 bp, Homo sapiens
tcagagtgtggtcaggcgg

SEQ ID NO: 12647 - DNA, 18 bp, Homo sapiens
tcagagttgagagacaga

SEQ ID NO: 12648 - DNA, 18 bp, Homo sapiens
tcagatagaaggaaatga

SEQ ID NO: 12649 - DNA, 21 bp, Homo sapiens
cggagcgggagctcttccgag

SEQ ID NO: 12650 - DNA, 18 bp, Homo sapiens
cggagctgaacggcgcgg

SEQ ID NO: 12651 - DNA, 17 bp, Homo sapiens
cggagctgagaggccta

SEQ ID NO: 12652 - DNA, 18 bp, Homo sapiens
cggagctgatcgggcgcc

SEQ ID NO: 12653 - DNA, 20 bp, Homo sapiens
cggagctgcggtggcgtctc

SEQ ID NO: 12654 - DNA, 18 bp, Homo sapiens
cggagctggagccggggc

SEQ ID NO: 12655 - DNA, 18 bp, Homo sapiens
cggagctggcggcagtga

SEQ ID NO: 12656 - DNA, 17 bp, Homo sapiens
cggagcttggctgttgg

SEQ ID NO: 12657 - DNA, 22 bp, Homo sapiens
cggaggaaggtctgaggagcag

SEQ ID NO: 12658 - DNA, 18 bp, Homo sapiens
cggaggaagtgaggacgg

SEQ ID NO: 12659 - DNA, 20 bp, Homo sapiens
cggaggaagtgaggacggcg

SEQ ID NO: 12660 - DNA, 16 bp, Homo sapiens
cggaggacggggtgaa

SEQ ID NO: 12661 - DNA, 18 bp, Homo sapiens
cggaggacggggtggggt

SEQ ID NO: 12662 - DNA, 18 bp, Homo sapiens
cggaggagacagggctac

SEQ ID NO: 12663 - DNA, 17 bp, Homo sapiens
cggaggagcccggactg

SEQ ID NO: 12664 - DNA, 18 bp, Homo sapiens
cggaggagcggctgctgc

SEQ ID NO: 12665 - DNA, 18 bp, Homo sapiens
cggaggaggccaaggtgc

SEQ ID NO: 12666 - DNA, 19 bp, Homo sapiens
cggaggaggccaaggtgca

SEQ ID NO: 12667 - DNA, 18 bp, Homo sapiens
cggaggaggccagacctg

SEQ ID NO: 12668 - DNA, 21 bp, Homo sapiens
cggaggaggcgaattagtccg

SEQ ID NO: 12669 - DNA, 17 bp, Homo sapiens
cggaggaggcggttcgg

SEQ ID NO: 12670 - DNA, 20 bp, Homo sapiens
cggaggaggggccaaagcca

SEQ ID NO: 12671 - DNA, 19 bp, Homo sapiens
cggaggattagagcaggcg

SEQ ID NO: 12672 - DNA, 21 bp, Homo sapiens
cggaggccggagcggagccgc

SEQ ID NO: 12673 - DNA, 20 bp, Homo sapiens
cggaggcgccgactcggcct

SEQ ID NO: 12674 - DNA, 18 bp, Homo sapiens
cggaggcgcgcggaacag

SEQ ID NO: 12675 - DNA, 17 bp, Homo sapiens
cggaggcggaggttctg

SEQ ID NO: 12676 - DNA, 20 bp, Homo sapiens
cggaggcggggtcgggcctg

SEQ ID NO: 12677 - DNA, 18 bp, Homo sapiens
cggaggcgtgggtgacgc

SEQ ID NO: 12678 - DNA, 21 bp, Homo sapiens
cggagggaagcaaaggaccgt

SEQ ID NO: 12679 - DNA, 18 bp, Homo sapiens
cggagggagccgaagtgc

SEQ ID NO: 12680 - DNA, 18 bp, Homo sapiens
cggaggggaaataaaagg

SEQ ID NO: 12681 - DNA, 18 bp, Homo sapiens
cggagggggaggtggctg

SEQ ID NO: 12682 - DNA, 16 bp, Homo sapiens
cggagggtgagcgtca

SEQ ID NO: 12683 - DNA, 20 bp, Homo sapiens
cggaggtagcaagatggccg

SEQ ID NO: 12684 - DNA, 18 bp, Homo sapiens
cggaggtaggggcaactc

SEQ ID NO: 12685 - DNA, 18 bp, Homo sapiens
cggaggtcagggcgagcg

SEQ ID NO: 12686 - DNA, 22 bp, Homo sapiens
cggaggtctgaagggggacagg

SEQ ID NO: 12687 - DNA, 18 bp, Homo sapiens
cggaggtgagcagggaaa

SEQ ID NO: 12688 - DNA, 21 bp, Homo sapiens
cggaggtgaggcggaactctg

SEQ ID NO: 12689 - DNA, 21 bp, Homo sapiens
cggaggtgctgcggcccgggg

SEQ ID NO: 12690 - DNA, 16 bp, Homo sapiens
cggaggtttcggagca

SEQ ID NO: 12691 - DNA, 17 bp, Homo sapiens
cggagtagacggagccg

SEQ ID NO: 12692 - DNA, 19 bp, Homo sapiens
cggagtagacggaggaggc

SEQ ID NO: 12693 - DNA, 17 bp, Homo sapiens
cggagtagagatggccg

SEQ ID NO: 12694 - DNA, 18 bp, Homo sapiens
cggagtagcaacgcaaag

SEQ ID NO: 12695 - DNA, 20 bp, Homo sapiens
cggagtagcaacgcaaagcg

SEQ ID NO: 12696 - DNA, 18 bp, Homo sapiens
cggagtatcctggagctg

SEQ ID NO: 12697 - DNA, 17 bp, Homo sapiens
cggagtcggccggagcc

SEQ ID NO: 12698 - DNA, 18 bp, Homo sapiens
cggagtcggccggagcct

SEQ ID NO: 12699 - DNA, 16 bp, Homo sapiens
cggagtgaggcgaggc

SEQ ID NO: 12700 - DNA, 17 bp, Homo sapiens
cggagtgaggcgaggcc

SEQ ID NO: 12701 - DNA, 18 bp, Homo sapiens
cggagtgaggcgaggccg

SEQ ID NO: 12702 - DNA, 19 bp, Homo sapiens
cggagtgaggcgaggccgc

SEQ ID NO: 12703 - DNA, 16 bp, Homo sapiens
cggagtggccttgcca

SEQ ID NO: 12704 - DNA, 18 bp, Homo sapiens
cggagtttcactttgtaa

SEQ ID NO: 12705 - DNA, 18 bp, Homo sapiens
cggataaatccccgtagg

SEQ ID NO: 12706 - DNA, 18 bp, Homo sapiens
tcagattgatccttcccg

SEQ ID NO: 12707 - DNA, 18 bp, Homo sapiens
tcagcagcaaacagctct

SEQ ID NO: 12708 - DNA, 24 bp, Homo sapiens
tcagcagcagttggagctggtgca

SEQ ID NO: 12709 - DNA, 18 bp, Homo sapiens
tcagcagctgcgggagac

SEQ ID NO: 12710 - DNA, 18 bp, Homo sapiens
tcagccagcatgaccgag

SEQ ID NO: 12711 - DNA, 20 bp, Homo sapiens
tcagccctgctggagccaga

SEQ ID NO: 12712 - DNA, 18 bp, Homo sapiens
tcagccgatgcggggctg

SEQ ID NO: 12713 - DNA, 19 bp, Homo sapiens
tcagccgcggctgcgggac

SEQ ID NO: 12714 - DNA, 19 bp, Homo sapiens
tcagccgggaactctgaac

SEQ ID NO: 12715 - DNA, 19 bp, Homo sapiens
tcagcctgaccacgctcca

SEQ ID NO: 12716 - DNA, 17 bp, Homo sapiens
tcagccttcttcgggcc

SEQ ID NO: 12717 - DNA, 18 bp, Homo sapiens
tcagcggaagtgtcggtc

SEQ ID NO: 12718 - DNA, 21 bp, Homo sapiens
tcagcggctgcccccgcctcc

SEQ ID NO: 12719 - DNA, 18 bp, Homo sapiens
tcagcgggagccgagacg

SEQ ID NO: 12720 - DNA, 18 bp, Homo sapiens
tcagcggtgttggaactt

SEQ ID NO: 12721 - DNA, 18 bp, Homo sapiens
tcagctcaggaccgcgcg

SEQ ID NO: 12722 - DNA, 19 bp, Homo sapiens
tcagctcctgctccgaaga

SEQ ID NO: 12723 - DNA, 18 bp, Homo sapiens
tcagctgcgaggcgtgag

SEQ ID NO: 12724 - DNA, 21 bp, Homo sapiens
tcagctgcggaccgaggcgag

SEQ ID NO: 12725 - DNA, 16 bp, Homo sapiens
tcagctggggtcgctc

SEQ ID NO: 12726 - DNA, 18 bp, Homo sapiens
tcaggaactgcaggagcg

SEQ ID NO: 12727 - DNA, 20 bp, Homo sapiens
tcaggaagattgtgcatgcc

SEQ ID NO: 12728 - DNA, 16 bp, Homo sapiens
tcaggacgagggacgg

SEQ ID NO: 12729 - DNA, 18 bp, Homo sapiens
tcaggcacgcgctttcgg

SEQ ID NO: 12730 - DNA, 17 bp, Homo sapiens
tcaggctctcctagcag

SEQ ID NO: 12731 - DNA, 18 bp, Homo sapiens
tcagggaaggtggggcta

SEQ ID NO: 12732 - DNA, 18 bp, Homo sapiens
tcagggagcttgtcgacg

SEQ ID NO: 12733 - DNA, 18 bp, Homo sapiens
tcagggagggcgaggccg

SEQ ID NO: 12734 - DNA, 20 bp, Homo sapiens
tcagggcaacgccgcgggag

SEQ ID NO: 12735 - DNA, 20 bp, Homo sapiens
tcagggcctggcaccctctg

SEQ ID NO: 12736 - DNA, 19 bp, Homo sapiens
tcaggggaggtgggaagag

SEQ ID NO: 12737 - DNA, 18 bp, Homo sapiens
tcaggggttgggaaggtg

SEQ ID NO: 12738 - DNA, 21 bp, Homo sapiens
tcagggtggaagcctggcgca

SEQ ID NO: 12739 - DNA, 18 bp, Homo sapiens
tcaggtaccgctgcggcc

SEQ ID NO: 12740 - DNA, 19 bp, Homo sapiens
tcaggtcagtggagagcga

SEQ ID NO: 12741 - DNA, 18 bp, Homo sapiens
tcaggtctcattctgtgc

SEQ ID NO: 12742 - DNA, 22 bp, Homo sapiens
tcaggtttcggggtgggggtgg

SEQ ID NO: 12743 - DNA, 19 bp, Homo sapiens
tcagtacccctgcagccgg

SEQ ID NO: 12744 - DNA, 17 bp, Homo sapiens
tcagtccggtgtttgca

SEQ ID NO: 12745 - DNA, 19 bp, Homo sapiens
tcagtcggagcgaagcggc

SEQ ID NO: 12746 - DNA, 19 bp, Homo sapiens
tcagtctccacccggacta

SEQ ID NO: 12747 - DNA, 20 bp, Homo sapiens
tcagtgtctcagaggagggg

SEQ ID NO: 12748 - DNA, 18 bp, Homo sapiens
tcagttttggggagtgct

SEQ ID NO: 12749 - DNA, 21 bp, Homo sapiens
tcatatttgagtgggcggtgg

SEQ ID NO: 12750 - DNA, 18 bp, Homo sapiens
tcatcgcgagctacgccc

SEQ ID NO: 12751 - DNA, 16 bp, Homo sapiens
tcatcggcgctttgcc

SEQ ID NO: 12752 - DNA, 21 bp, Homo sapiens
tcatctcaaaatgctgaactg

SEQ ID NO: 12753 - DNA, 18 bp, Homo sapiens
tcatgaaccgcgagagct

SEQ ID NO: 12754 - DNA, 21 bp, Homo sapiens
tcatggcggcgctgtgtcgga

SEQ ID NO: 12755 - DNA, 22 bp, Homo sapiens
tcatggcggctgagtgggcttc

SEQ ID NO: 12756 - DNA, 16 bp, Homo sapiens
tcatgtcgcgttacgg

SEQ ID NO: 12757 - DNA, 18 bp, Homo sapiens
tcattcatagagccagcg

SEQ ID NO: 12758 - DNA, 19 bp, Homo sapiens
tcatttagtgcgggaggga

SEQ ID NO: 12759 - DNA, 17 bp, Homo sapiens
tcatttcctcccagcct

SEQ ID NO: 12760 - DNA, 19 bp, Homo sapiens
tcatttcctcccagcctcg

SEQ ID NO: 12761 - DNA, 18 bp, Homo sapiens
tcattttgctgctggtgg

SEQ ID NO: 12762 - DNA, 23 bp, Homo sapiens
tccaaaaaggctgttacgaaagt

SEQ ID NO: 12763 - DNA, 19 bp, Homo sapiens
cggatacagggagggcaag

SEQ ID NO: 12764 - DNA, 16 bp, Homo sapiens
cggatagactgggggc

SEQ ID NO: 12765 - DNA, 20 bp, Homo sapiens
cggatatctgacagaagcct

SEQ ID NO: 12766 - DNA, 17 bp, Homo sapiens
cggatcagagagggcta

SEQ ID NO: 12767 - DNA, 22 bp, Homo sapiens
cggatccctgggcgtccgtacg

SEQ ID NO: 12768 - DNA, 16 bp, Homo sapiens
cggatcggcaacagtg

SEQ ID NO: 12769 - DNA, 16 bp, Homo sapiens
cggatcggccgactag

SEQ ID NO: 12770 - DNA, 15 bp, Homo sapiens
cggatcggcgtccgc

SEQ ID NO: 12771 - DNA, 18 bp, Homo sapiens
cggatcggtcggaaatgg

SEQ ID NO: 12772 - DNA, 18 bp, Homo sapiens
cggatcgtggcatgatgg

SEQ ID NO: 12773 - DNA, 18 bp, Homo sapiens
cggatcgttcggagccgg

SEQ ID NO: 12774 - DNA, 21 bp, Homo sapiens
cggatctccggcttccggcaa

SEQ ID NO: 12775 - DNA, 17 bp, Homo sapiens
cggatctggacacccag

SEQ ID NO: 12776 - DNA, 23 bp, Homo sapiens
cggatctggacacccagcggtct

SEQ ID NO: 12777 - DNA, 18 bp, Homo sapiens
cggatctggacgtggtga

SEQ ID NO: 12778 - DNA, 18 bp, Homo sapiens
cggatctggaggagcagt

SEQ ID NO: 12779 - DNA, 18 bp, Homo sapiens
cggatcttcatcggcaca

SEQ ID NO: 12780 - DNA, 16 bp, Homo sapiens
cggatgagggaagggc

SEQ ID NO: 12781 - DNA, 17 bp, Homo sapiens
cggatggcagaggaagg

SEQ ID NO: 12782 - DNA, 18 bp, Homo sapiens
cggatggcagaggaagga

SEQ ID NO: 12783 - DNA, 19 bp, Homo sapiens
cggatggcagaggaaggag

SEQ ID NO: 12784 - DNA, 20 bp, Homo sapiens
cggatggcagaggaaggagg

SEQ ID NO: 12785 - DNA, 22 bp, Homo sapiens
cggatggcagaggaaggaggcg

SEQ ID NO: 12786 - DNA, 19 bp, Homo sapiens
cggattgcggttcgcggcg

SEQ ID NO: 12787 - DNA, 18 bp, Homo sapiens
cggattttagaggaaggc

SEQ ID NO: 12788 - DNA, 19 bp, Homo sapiens
cggattttagaggaaggcg

SEQ ID NO: 12789 - DNA, 18 bp, Homo sapiens
cggcaaagaaccgggctg

SEQ ID NO: 12790 - DNA, 19 bp, Homo sapiens
cggcaaaggaggtaagggc

SEQ ID NO: 12791 - DNA, 18 bp, Homo sapiens
cggcaaccgagggacccg

SEQ ID NO: 12792 - DNA, 18 bp, Homo sapiens
cggcaacgtcggggacgg

SEQ ID NO: 12793 - DNA, 21 bp, Homo sapiens
cggcaagaagtgtctgggctg

SEQ ID NO: 12794 - DNA, 18 bp, Homo sapiens
cggcaaggagagacgtcg

SEQ ID NO: 12795 - DNA, 18 bp, Homo sapiens
cggcaaggagagaggcca

SEQ ID NO: 12796 - DNA, 16 bp, Homo sapiens
cggcaaggtaggttgg

SEQ ID NO: 12797 - DNA, 19 bp, Homo sapiens
cggcaaggtaggttggcgg

SEQ ID NO: 12798 - DNA, 19 bp, Homo sapiens
cggcaagtggttcttcctc

SEQ ID NO: 12799 - DNA, 16 bp, Homo sapiens
cggcaatggacgggta

SEQ ID NO: 12800 - DNA, 18 bp, Homo sapiens
cggcaatggagcggttga

SEQ ID NO: 12801 - DNA, 20 bp, Homo sapiens
cggcaatggagcggttgacg

SEQ ID NO: 12802 - DNA, 21 bp, Homo sapiens
cggcaccacagcggtggctgc

SEQ ID NO: 12803 - DNA, 16 bp, Homo sapiens
cggcaccgctcaccga

SEQ ID NO: 12804 - DNA, 20 bp, Homo sapiens
cggcacctcattcatttcta

SEQ ID NO: 12805 - DNA, 18 bp, Homo sapiens
cggcacggacagcgcctc

SEQ ID NO: 12806 - DNA, 21 bp, Homo sapiens
cggcacggcggcggccaggcg

SEQ ID NO: 12807 - DNA, 19 bp, Homo sapiens
cggcactgagggcaacggc

SEQ ID NO: 12808 - DNA, 20 bp, Homo sapiens
cggcactgagggcaacggcc

SEQ ID NO: 12809 - DNA, 21 bp, Homo sapiens
cggcactgagggcaacggccg

SEQ ID NO: 12810 - DNA, 22 bp, Homo sapiens
cggcagagacagaagagcgggg

SEQ ID NO: 12811 - DNA, 16 bp, Homo sapiens
cggcagagctggagtg

SEQ ID NO: 12812 - DNA, 16 bp, Homo sapiens
cggcagaggtctctgc

SEQ ID NO: 12813 - DNA, 16 bp, Homo sapiens
cggcagcaactcggcg

SEQ ID NO: 12814 - DNA, 18 bp, Homo sapiens
cggcagcagaggcaggga

SEQ ID NO: 12815 - DNA, 17 bp, Homo sapiens
cggcagcagcagcagcg

SEQ ID NO: 12816 - DNA, 15 bp, Homo sapiens
cggcagccggagctt

SEQ ID NO: 12817 - DNA, 18 bp, Homo sapiens
cggcagccgggctcggag

SEQ ID NO: 12818 - DNA, 19 bp, Homo sapiens
cggcagcgatggatgtgga

SEQ ID NO: 12819 - DNA, 17 bp, Homo sapiens
cggcagcgcgctctgcc

SEQ ID NO: 12820 - DNA, 18 bp, Homo sapiens
tccaacatggcggagctg

SEQ ID NO: 12821 - DNA, 19 bp, Homo sapiens
tccaacatggcggcgccca

SEQ ID NO: 12822 - DNA, 17 bp, Homo sapiens
tccaactgggagagctg

SEQ ID NO: 12823 - DNA, 18 bp, Homo sapiens
tccaactgggagagctgc

SEQ ID NO: 12824 - DNA, 19 bp, Homo sapiens
tccaactgggagagctgca

SEQ ID NO: 12825 - DNA, 21 bp, Homo sapiens
tccaactgggagagctgcagc

SEQ ID NO: 12826 - DNA, 18 bp, Homo sapiens
tccaagatggcggaactg

SEQ ID NO: 12827 - DNA, 19 bp, Homo sapiens
tccaagatggcggaactgc

SEQ ID NO: 12828 - DNA, 19 bp, Homo sapiens
tccaagatggcggatgaag

SEQ ID NO: 12829 - DNA, 18 bp, Homo sapiens
tccaattggtcaagcctt

SEQ ID NO: 12830 - DNA, 18 bp, Homo sapiens
tccacttccggcgtatga

SEQ ID NO: 12831 - DNA, 21 bp, Homo sapiens
tccacttccggcgtatgaggc

SEQ ID NO: 12832 - DNA, 18 bp, Homo sapiens
tccagaattatggcgaag

SEQ ID NO: 12833 - DNA, 20 bp, Homo sapiens
tccagaattatggcgaagtc

SEQ ID NO: 12834 - DNA, 18 bp, Homo sapiens
tccagacgtcgtggtcgt

SEQ ID NO: 12835 - DNA, 20 bp, Homo sapiens
tccagactctgcacaagaag

SEQ ID NO: 12836 - DNA, 18 bp, Homo sapiens
tccagagacacgagcgtg

SEQ ID NO: 12837 - DNA, 18 bp, Homo sapiens
tccagagactgacgagtg

SEQ ID NO: 12838 - DNA, 20 bp, Homo sapiens
tccagagcctccgggtctgg

SEQ ID NO: 12839 - DNA, 20 bp, Homo sapiens
tccagagtgagtgcctgggg

SEQ ID NO: 12840 - DNA, 18 bp, Homo sapiens
tccagataggcgacacgc

SEQ ID NO: 12841 - DNA, 19 bp, Homo sapiens
tccagcagccaagatggtg

SEQ ID NO: 12842 - DNA, 17 bp, Homo sapiens
tccagcgagcgttgccg

SEQ ID NO: 12843 - DNA, 21 bp, Homo sapiens
tccagcgggagaacgataatg

SEQ ID NO: 12844 - DNA, 18 bp, Homo sapiens
tccagctgagggtagatg

SEQ ID NO: 12845 - DNA, 19 bp, Homo sapiens
tccagctgcagccactctc

SEQ ID NO: 12846 - DNA, 21 bp, Homo sapiens
tccaggattcagactagagag

SEQ ID NO: 12847 - DNA, 20 bp, Homo sapiens
tccaggccagactctaaagg

SEQ ID NO: 12848 - DNA, 22 bp, Homo sapiens
tccagggaggcagggcccgggg

SEQ ID NO: 12849 - DNA, 16 bp, Homo sapiens
tccaggtccgggactg

SEQ ID NO: 12850 - DNA, 17 bp, Homo sapiens
tccaggtccgggactgc

SEQ ID NO: 12851 - DNA, 19 bp, Homo sapiens
tccaggtgagtctgtcgga

SEQ ID NO: 12852 - DNA, 18 bp, Homo sapiens
tccagtaagaagccagca

SEQ ID NO: 12853 - DNA, 18 bp, Homo sapiens
tccagtgggacagcgcat

SEQ ID NO: 12854 - DNA, 19 bp, Homo sapiens
tccagttgcttcggctccc

SEQ ID NO: 12855 - DNA, 18 bp, Homo sapiens
tccagtttgttaggactg

SEQ ID NO: 12856 - DNA, 19 bp, Homo sapiens
tccagtttgttaggactgc

SEQ ID NO: 12857 - DNA, 20 bp, Homo sapiens
tccagtttgttaggactgct

SEQ ID NO: 12858 - DNA, 18 bp, Homo sapiens
tccatccgcttggcccca

SEQ ID NO: 12859 - DNA, 21 bp, Homo sapiens
tccatgactcctgaactctca

SEQ ID NO: 12860 - DNA, 20 bp, Homo sapiens
tcccaaacgaggtgcgggac

SEQ ID NO: 12861 - DNA, 17 bp, Homo sapiens
tcccacttgggtctgcg

SEQ ID NO: 12862 - DNA, 18 bp, Homo sapiens
tcccagactgtggacggg

SEQ ID NO: 12863 - DNA, 21 bp, Homo sapiens
tcccagatgcacaggaggaga

SEQ ID NO: 12864 - DNA, 18 bp, Homo sapiens
tcccagcgctttggcttc

SEQ ID NO: 12865 - DNA, 19 bp, Homo sapiens
tcccaggccgtcgaccccg

SEQ ID NO: 12866 - DNA, 18 bp, Homo sapiens
tcccagtcagtccggagg

SEQ ID NO: 12867 - DNA, 18 bp, Homo sapiens
tcccagtcggcaccacag

SEQ ID NO: 12868 - DNA, 17 bp, Homo sapiens
tcccagtgtctgctctt

SEQ ID NO: 12869 - DNA, 23 bp, Homo sapiens
tcccatcggcgaagatggccctg

SEQ ID NO: 12870 - DNA, 18 bp, Homo sapiens
tccccactcccacctcca

SEQ ID NO: 12871 - DNA, 18 bp, Homo sapiens
tccccagccttccccgcg

SEQ ID NO: 12872 - DNA, 18 bp, Homo sapiens
tccccaggcctcagtctc

SEQ ID NO: 12873 - DNA, 20 bp, Homo sapiens
tccccccaccccgctcacac

SEQ ID NO: 12874 - DNA, 24 bp, Homo sapiens
tccccccagctagtgagtgcgcga

SEQ ID NO: 12875 - DNA, 20 bp, Homo sapiens
tcccccggactccttggtag

SEQ ID NO: 12876 - DNA, 18 bp, Homo sapiens
tccccgcaccgggctacc

SEQ ID NO: 12877 - DNA, 20 bp, Homo sapiens
cggcagcggagcgcagcatc

SEQ ID NO: 12878 - DNA, 22 bp, Homo sapiens
cggcagcggcaactcgagcccc

SEQ ID NO: 12879 - DNA, 18 bp, Homo sapiens
cggcagcggcctgacccg

SEQ ID NO: 12880 - DNA, 19 bp, Homo sapiens
cggcagcggcgcggcccgg

SEQ ID NO: 12881 - DNA, 18 bp, Homo sapiens
cggcagcggcggtggcgg

SEQ ID NO: 12882 - DNA, 17 bp, Homo sapiens
cggcagcgggatcggga

SEQ ID NO: 12883 - DNA, 22 bp, Homo sapiens
cggcagctgaacccacccggcg

SEQ ID NO: 12884 - DNA, 19 bp, Homo sapiens
cggcagctgcactgcgtct

SEQ ID NO: 12885 - DNA, 18 bp, Homo sapiens
cggcagctgcagtaagtt

SEQ ID NO: 12886 - DNA, 20 bp, Homo sapiens
cggcagctgtacagggcggg

SEQ ID NO: 12887 - DNA, 18 bp, Homo sapiens
cggcagctgtggccccgg

SEQ ID NO: 12888 - DNA, 18 bp, Homo sapiens
cggcaggaagcgggacgc

SEQ ID NO: 12889 - DNA, 23 bp, Homo sapiens
cggcaggaagtgggaccggtgtc

SEQ ID NO: 12890 - DNA, 20 bp, Homo sapiens
cggcaggaccaaggcggcgg

SEQ ID NO: 12891 - DNA, 20 bp, Homo sapiens
cggcaggacggtagaagtcg

SEQ ID NO: 12892 - DNA, 18 bp, Homo sapiens
cggcaggagcaggacctg

SEQ ID NO: 12893 - DNA, 19 bp, Homo sapiens
cggcaggagcaggacctgg

SEQ ID NO: 12894 - DNA, 20 bp, Homo sapiens
cggcaggcacagctcggccg

SEQ ID NO: 12895 - DNA, 18 bp, Homo sapiens
cggcaggcgaagagagaa

SEQ ID NO: 12896 - DNA, 18 bp, Homo sapiens
cggcagggactacaccgg

SEQ ID NO: 12897 - DNA, 20 bp, Homo sapiens
cggcagggactacaccggtg

SEQ ID NO: 12898 - DNA, 18 bp, Homo sapiens
cggcagggcctgtgtgtg

SEQ ID NO: 12899 - DNA, 17 bp, Homo sapiens
cggcagggctggcattg

SEQ ID NO: 12900 - DNA, 20 bp, Homo sapiens
cggcaggggtggggagagtg

SEQ ID NO: 12901 - DNA, 16 bp, Homo sapiens
cggcaggtagaagggg

SEQ ID NO: 12902 - DNA, 18 bp, Homo sapiens
cggcaggtagaaggggcg

SEQ ID NO: 12903 - DNA, 18 bp, Homo sapiens
cggcaggtaggcgcggcc

SEQ ID NO: 12904 - DNA, 18 bp, Homo sapiens
cggcagtagggacagcag

SEQ ID NO: 12905 - DNA, 16 bp, Homo sapiens
cggcagtcacttgtac

SEQ ID NO: 12906 - DNA, 18 bp, Homo sapiens
cggcagtgaaccgggagg

SEQ ID NO: 12907 - DNA, 17 bp, Homo sapiens
cggcagtgacagaatgg

SEQ ID NO: 12908 - DNA, 17 bp, Homo sapiens
cggcagtggagaagcgg

SEQ ID NO: 12909 - DNA, 18 bp, Homo sapiens
cggcagtgtgaggagctg

SEQ ID NO: 12910 - DNA, 15 bp, Homo sapiens
cggcatcgcggcgac

SEQ ID NO: 12911 - DNA, 19 bp, Homo sapiens
cggcatcgggtgaggagcg

SEQ ID NO: 12912 - DNA, 18 bp, Homo sapiens
cggcatgcagaagcttca

SEQ ID NO: 12913 - DNA, 18 bp, Homo sapiens
cggcatggcagctgctac

SEQ ID NO: 12914 - DNA, 19 bp, Homo sapiens
cggcatgggcccgggccac

SEQ ID NO: 12915 - DNA, 16 bp, Homo sapiens
cggccaccctgtcgcg

SEQ ID NO: 12916 - DNA, 17 bp, Homo sapiens
cggccaccgcctccgct

SEQ ID NO: 12917 - DNA, 19 bp, Homo sapiens
cggccacggcagggacacg

SEQ ID NO: 12918 - DNA, 17 bp, Homo sapiens
cggccactcggagctgc

SEQ ID NO: 12919 - DNA, 17 bp, Homo sapiens
cggccactggggcagag

SEQ ID NO: 12920 - DNA, 23 bp, Homo sapiens
cggccagagtgggggactaggtg

SEQ ID NO: 12921 - DNA, 22 bp, Homo sapiens
cggccagatcggggatagaacg

SEQ ID NO: 12922 - DNA, 17 bp, Homo sapiens
cggccagcccgcccacc

SEQ ID NO: 12923 - DNA, 18 bp, Homo sapiens
cggccaggccagcctcgg

SEQ ID NO: 12924 - DNA, 19 bp, Homo sapiens
cggccagggtaacgctgtc

SEQ ID NO: 12925 - DNA, 16 bp, Homo sapiens
cggccagtagagggat

SEQ ID NO: 12926 - DNA, 18 bp, Homo sapiens
cggccagtggtgctgagc

SEQ ID NO: 12927 - DNA, 20 bp, Homo sapiens
cggccatggagctggaggta

SEQ ID NO: 12928 - DNA, 19 bp, Homo sapiens
cggcccagccagcgcccgc

SEQ ID NO: 12929 - DNA, 17 bp, Homo sapiens
cggcccaggggcgagta

SEQ ID NO: 12930 - DNA, 18 bp, Homo sapiens
cggccccgagatgaagcc

SEQ ID NO: 12931 - DNA, 18 bp, Homo sapiens
cggccccgagctctgtgg

SEQ ID NO: 12932 - DNA, 16 bp, Homo sapiens
cggccccggacgaagg

SEQ ID NO: 12933 - DNA, 18 bp, Homo sapiens
cggccccggacgaaggta

SEQ ID NO: 12934 - DNA, 20 bp, Homo sapiens
tccccggaagccgccgaaac

SEQ ID NO: 12935 - DNA, 17 bp, Homo sapiens
tccccggctgattggat

SEQ ID NO: 12936 - DNA, 21 bp, Homo sapiens
tccccggttttacgaggcgcg

SEQ ID NO: 12937 - DNA, 19 bp, Homo sapiens
tcccctcctttctggactc

SEQ ID NO: 12938 - DNA, 18 bp, Homo sapiens
tcccgaacagacctgacg

SEQ ID NO: 12939 - DNA, 18 bp, Homo sapiens
tcccgacgccggtcctcc

SEQ ID NO: 12940 - DNA, 19 bp, Homo sapiens
tcccgagtgacgactcctc

SEQ ID NO: 12941 - DNA, 20 bp, Homo sapiens
tcccgcagctcctgctctgg

SEQ ID NO: 12942 - DNA, 21 bp, Homo sapiens
tcccgcagctcctgctctggt

SEQ ID NO: 12943 - DNA, 19 bp, Homo sapiens
tcccgcatggcggcgcaca

SEQ ID NO: 12944 - DNA, 17 bp, Homo sapiens
tcccgccacactccaga

SEQ ID NO: 12945 - DNA, 18 bp, Homo sapiens
tcccgcccggcgccagcg

SEQ ID NO: 12946 - DNA, 18 bp, Homo sapiens
tcccgcgctgccggaacc

SEQ ID NO: 12947 - DNA, 21 bp, Homo sapiens
tcccgctggcctggcaggtga

SEQ ID NO: 12948 - DNA, 18 bp, Homo sapiens
tcccggaagtgcgtgctg

SEQ ID NO: 12949 - DNA, 18 bp, Homo sapiens
tcccggagagctgagcag

SEQ ID NO: 12950 - DNA, 20 bp, Homo sapiens
tcccggagaggtgagtcggc

SEQ ID NO: 12951 - DNA, 22 bp, Homo sapiens
tcccggctgggttgtcagtcag

SEQ ID NO: 12952 - DNA, 17 bp, Homo sapiens
tcccgggcgccagggct

SEQ ID NO: 12953 - DNA, 18 bp, Homo sapiens
tcccgggtccctcagaca

SEQ ID NO: 12954 - DNA, 20 bp, Homo sapiens
tcccgggtccctcagacaag

SEQ ID NO: 12955 - DNA, 18 bp, Homo sapiens
tcccgggtgaacggagct

SEQ ID NO: 12956 - DNA, 18 bp, Homo sapiens
tcccgggtggcaggaggc

SEQ ID NO: 12957 - DNA, 20 bp, Homo sapiens
tcccgggtgttcgccgctgg

SEQ ID NO: 12958 - DNA, 20 bp, Homo sapiens
tcccggtgtggctgtgccgt

SEQ ID NO: 12959 - DNA, 18 bp, Homo sapiens
tcccgtacggtggacggc

SEQ ID NO: 12960 - DNA, 17 bp, Homo sapiens
tccctaccggtgagttc

SEQ ID NO: 12961 - DNA, 18 bp, Homo sapiens
tccctagtcctcgaaggc

SEQ ID NO: 12962 - DNA, 18 bp, Homo sapiens
tccctatttcctggttcg

SEQ ID NO: 12963 - DNA, 22 bp, Homo sapiens
tccctcaggtctcattctgtgc

SEQ ID NO: 12964 - DNA, 18 bp, Homo sapiens
tccctcccgggccggcgc

SEQ ID NO: 12965 - DNA, 17 bp, Homo sapiens
tccctcggagcgggcgg

SEQ ID NO: 12966 - DNA, 17 bp, Homo sapiens
tccctgaggctgaggcg

SEQ ID NO: 12967 - DNA, 17 bp, Homo sapiens
tccctgagttagtccgg

SEQ ID NO: 12968 - DNA, 19 bp, Homo sapiens
tccctggcgccgagcccgc

SEQ ID NO: 12969 - DNA, 20 bp, Homo sapiens
tccctgtagcagctccttat

SEQ ID NO: 12970 - DNA, 20 bp, Homo sapiens
tcccttctagaggcaggcag

SEQ ID NO: 12971 - DNA, 19 bp, Homo sapiens
tcccttgacacggcggacg

SEQ ID NO: 12972 - DNA, 18 bp, Homo sapiens
tccctttccgggcgggca

SEQ ID NO: 12973 - DNA, 19 bp, Homo sapiens
tccgaaagcagcggcggcg

SEQ ID NO: 12974 - DNA, 20 bp, Homo sapiens
tccgaacggcgtggtgtggt

SEQ ID NO: 12975 - DNA, 19 bp, Homo sapiens
tccgaagaagggttccaag

SEQ ID NO: 12976 - DNA, 24 bp, Homo sapiens
tccgacgtgcagcctggcagtgca

SEQ ID NO: 12977 - DNA, 16 bp, Homo sapiens
tccgactcggaacggc

SEQ ID NO: 12978 - DNA, 17 bp, Homo sapiens
tccgactcggaacggct

SEQ ID NO: 12979 - DNA, 21 bp, Homo sapiens
tccgacttcggacatggcgca

SEQ ID NO: 12980 - DNA, 17 bp, Homo sapiens
tccgagctggaccgggc

SEQ ID NO: 12981 - DNA, 20 bp, Homo sapiens
tccgagctgtatgaagagag

SEQ ID NO: 12982 - DNA, 24 bp, Homo sapiens
tccgatctcgcgagagaggacgga

SEQ ID NO: 12983 - DNA, 16 bp, Homo sapiens
tccgcattgcagactg

SEQ ID NO: 12984 - DNA, 17 bp, Homo sapiens
tccgccaagtgcgcctg

SEQ ID NO: 12985 - DNA, 18 bp, Homo sapiens
tccgccaggccgcttcca

SEQ ID NO: 12986 - DNA, 18 bp, Homo sapiens
tccgccccgcggcgtccg

SEQ ID NO: 12987 - DNA, 19 bp, Homo sapiens
tccgccccgggtcgctgcc

SEQ ID NO: 12988 - DNA, 22 bp, Homo sapiens
tccgccgcgctcttcttccttc

SEQ ID NO: 12989 - DNA, 17 bp, Homo sapiens
tccgccggccctttttt

SEQ ID NO: 12990 - DNA, 16 bp, Homo sapiens
tccgccggggccgagc

SEQ ID NO: 12991 - DNA, 20 bp, Homo sapiens
cggcccgagaactgacagac

SEQ ID NO: 12992 - DNA, 22 bp, Homo sapiens
cggcccgaggcagaggaacagg

SEQ ID NO: 12993 - DNA, 16 bp, Homo sapiens
cggcccgcttgctggc

SEQ ID NO: 12994 - DNA, 20 bp, Homo sapiens
cggcccggaggtggcgggag

SEQ ID NO: 12995 - DNA, 23 bp, Homo sapiens
cggcccggcagtgtcccgactcg

SEQ ID NO: 12996 - DNA, 17 bp, Homo sapiens
cggcccggcggcggcca

SEQ ID NO: 12997 - DNA, 19 bp, Homo sapiens
cggcccgggggcttcgggc

SEQ ID NO: 12998 - DNA, 17 bp, Homo sapiens
cggcccggtacttgtga

SEQ ID NO: 12999 - DNA, 18 bp, Homo sapiens
cggccctccgcttccccg

SEQ ID NO: 13000 - DNA, 18 bp, Homo sapiens
cggccctggcggtccagc

SEQ ID NO: 13001 - DNA, 17 bp, Homo sapiens
cggccgacatggcggca

SEQ ID NO: 13002 - DNA, 22 bp, Homo sapiens
cggccgacgggacccctaaagt

SEQ ID NO: 13003 - DNA, 18 bp, Homo sapiens
cggccgagctgaggcggt

SEQ ID NO: 13004 - DNA, 20 bp, Homo sapiens
cggccgaggctgaaggaaga

SEQ ID NO: 13005 - DNA, 20 bp, Homo sapiens
cggccgagggcgggcggacg

SEQ ID NO: 13006 - DNA, 18 bp, Homo sapiens
cggccgcaaggtgcgcag

SEQ ID NO: 13007 - DNA, 17 bp, Homo sapiens
cggccgcagaagcgaga

SEQ ID NO: 13008 - DNA, 18 bp, Homo sapiens
cggccgcagcgcgagcag

SEQ ID NO: 13009 - DNA, 18 bp, Homo sapiens
cggccgcaggggccagac

SEQ ID NO: 13010 - DNA, 16 bp, Homo sapiens
cggccgccatcttgta

SEQ ID NO: 13011 - DNA, 20 bp, Homo sapiens
cggccgccattttgtgcagt

SEQ ID NO: 13012 - DNA, 18 bp, Homo sapiens
cggccgcccagcggcgcc

SEQ ID NO: 13013 - DNA, 18 bp, Homo sapiens
cggccgccctggacgagc

SEQ ID NO: 13014 - DNA, 18 bp, Homo sapiens
cggccgccgagggaccgg

SEQ ID NO: 13015 - DNA, 18 bp, Homo sapiens
cggccgccgccgccaccg

SEQ ID NO: 13016 - DNA, 19 bp, Homo sapiens
cggccgccggagatgcctg

SEQ ID NO: 13017 - DNA, 18 bp, Homo sapiens
cggccgcgcagctggagg

SEQ ID NO: 13018 - DNA, 17 bp, Homo sapiens
cggccgcgcaggacttg

SEQ ID NO: 13019 - DNA, 18 bp, Homo sapiens
cggccgcgcggatcactg

SEQ ID NO: 13020 - DNA, 19 bp, Homo sapiens
cggccgcggctgcatctct

SEQ ID NO: 13021 - DNA, 18 bp, Homo sapiens
cggccgcggctgctgagg

SEQ ID NO: 13022 - DNA, 21 bp, Homo sapiens
cggccgctgcgccgccagggg

SEQ ID NO: 13023 - DNA, 21 bp, Homo sapiens
cggccgctgcggacggacgct

SEQ ID NO: 13024 - DNA, 21 bp, Homo sapiens
cggccggacccagactggtag

SEQ ID NO: 13025 - DNA, 17 bp, Homo sapiens
cggccggagaccgctgg

SEQ ID NO: 13026 - DNA, 18 bp, Homo sapiens
cggccggagctggtcggg

SEQ ID NO: 13027 - DNA, 18 bp, Homo sapiens
cggccggaggaggagtag

SEQ ID NO: 13028 - DNA, 21 bp, Homo sapiens
cggccggccctgggggctgac

SEQ ID NO: 13029 - DNA, 18 bp, Homo sapiens
cggccggcggcgccgcct

SEQ ID NO: 13030 - DNA, 19 bp, Homo sapiens
cggccgggaagatggcgga

SEQ ID NO: 13031 - DNA, 18 bp, Homo sapiens
cggccgggacggttggag

SEQ ID NO: 13032 - DNA, 16 bp, Homo sapiens
cggccgggagcggact

SEQ ID NO: 13033 - DNA, 18 bp, Homo sapiens
cggccgggagcggactta

SEQ ID NO: 13034 - DNA, 21 bp, Homo sapiens
cggccgggagcggacttacct

SEQ ID NO: 13035 - DNA, 16 bp, Homo sapiens
cggccgggaggccgtg

SEQ ID NO: 13036 - DNA, 18 bp, Homo sapiens
cggccgggcgctgacgga

SEQ ID NO: 13037 - DNA, 18 bp, Homo sapiens
cggccgggctggctatcg

SEQ ID NO: 13038 - DNA, 19 bp, Homo sapiens
cggccgggtggaggccaca

SEQ ID NO: 13039 - DNA, 18 bp, Homo sapiens
cggccggtactgttgaaa

SEQ ID NO: 13040 - DNA, 21 bp, Homo sapiens
cggccgtagcggccggggctg

SEQ ID NO: 13041 - DNA, 16 bp, Homo sapiens
cggccgtaggctaacg

SEQ ID NO: 13042 - DNA, 18 bp, Homo sapiens
cggccgtaggctaacgtg

SEQ ID NO: 13043 - DNA, 18 bp, Homo sapiens
cggccgtcggcggaggcg

SEQ ID NO: 13044 - DNA, 20 bp, Homo sapiens
cggccgtctctggagagcag

SEQ ID NO: 13045 - DNA, 21 bp, Homo sapiens
cggccgtctctggagagcagc

SEQ ID NO: 13046 - DNA, 24 bp, Homo sapiens
cggccgtctctggagagcagcagg

SEQ ID NO: 13047 - DNA, 16 bp, Homo sapiens
cggccgttcccacccc

SEQ ID NO: 13048 - DNA, 17 bp, Homo sapiens
tccgccggtggcgtcgg

SEQ ID NO: 13049 - DNA, 16 bp, Homo sapiens
tccgcctacctcgccc

SEQ ID NO: 13050 - DNA, 18 bp, Homo sapiens
tccgcctgaggcgagtga

SEQ ID NO: 13051 - DNA, 18 bp, Homo sapiens
tccgcctgtgtggaggtg

SEQ ID NO: 13052 - DNA, 19 bp, Homo sapiens
tccgcgacgcatcgccgcc

SEQ ID NO: 13053 - DNA, 18 bp, Homo sapiens
tccgcgatggtaggcggc

SEQ ID NO: 13054 - DNA, 18 bp, Homo sapiens
tccgcgccggctgcgcct

SEQ ID NO: 13055 - DNA, 16 bp, Homo sapiens
tccgcgcgcgtccgct

SEQ ID NO: 13056 - DNA, 20 bp, Homo sapiens
tccgcgcgctctctggcaag

SEQ ID NO: 13057 - DNA, 18 bp, Homo sapiens
tccgcgcgtccggacacc

SEQ ID NO: 13058 - DNA, 20 bp, Homo sapiens
tccgcggaccctgagcgcaa

SEQ ID NO: 13059 - DNA, 19 bp, Homo sapiens
tccgcggagcgacgaccgg

SEQ ID NO: 13060 - DNA, 21 bp, Homo sapiens
tccgcggccgtgtggagcgag

SEQ ID NO: 13061 - DNA, 18 bp, Homo sapiens
tccgcggcctatttaccc

SEQ ID NO: 13062 - DNA, 17 bp, Homo sapiens
tccgcgtctactgcgag

SEQ ID NO: 13063 - DNA, 17 bp, Homo sapiens
tccgctgctcgccatgg

SEQ ID NO: 13064 - DNA, 16 bp, Homo sapiens
tccgctgctgctgtca

SEQ ID NO: 13065 - DNA, 18 bp, Homo sapiens
tccgctggtcgtcgcggt

SEQ ID NO: 13066 - DNA, 17 bp, Homo sapiens
tccgctgtaggggaggt

SEQ ID NO: 13067 - DNA, 19 bp, Homo sapiens
tccggaagcgcctgcgcgc

SEQ ID NO: 13068 - DNA, 18 bp, Homo sapiens
tccggacacatagaaaga

SEQ ID NO: 13069 - DNA, 18 bp, Homo sapiens
tccggacaggccgagatg

SEQ ID NO: 13070 - DNA, 18 bp, Homo sapiens
tccggaccgcggcagctg

SEQ ID NO: 13071 - DNA, 18 bp, Homo sapiens
tccggacgtgcgaagcgt

SEQ ID NO: 13072 - DNA, 19 bp, Homo sapiens
tccggactccaggtaccgc

SEQ ID NO: 13073 - DNA, 20 bp, Homo sapiens
tccggacttcgagccatggc

SEQ ID NO: 13074 - DNA, 22 bp, Homo sapiens
tccggagagacctggctgctgt

SEQ ID NO: 13075 - DNA, 18 bp, Homo sapiens
tccggagagcgggaaggc

SEQ ID NO: 13076 - DNA, 20 bp, Homo sapiens
tccggagagcggggcctgcg

SEQ ID NO: 13077 - DNA, 18 bp, Homo sapiens
tccggagcctgcagcatg

SEQ ID NO: 13078 - DNA, 18 bp, Homo sapiens
tccggagctgaaaaagga

SEQ ID NO: 13079 - DNA, 16 bp, Homo sapiens
tccggagctgaagcag

SEQ ID NO: 13080 - DNA, 18 bp, Homo sapiens
tccggagctgaagcagat

SEQ ID NO: 13081 - DNA, 18 bp, Homo sapiens
tccggagctgcggcggcg

SEQ ID NO: 13082 - DNA, 22 bp, Homo sapiens
tccggagctggtgaggacagcc

SEQ ID NO: 13083 - DNA, 19 bp, Homo sapiens
tccggaggtgaggcggaac

SEQ ID NO: 13084 - DNA, 20 bp, Homo sapiens
tccggagtccgagacctggg

SEQ ID NO: 13085 - DNA, 18 bp, Homo sapiens
tccggcacagcggacacc

SEQ ID NO: 13086 - DNA, 16 bp, Homo sapiens
tccggcagcatggagg

SEQ ID NO: 13087 - DNA, 20 bp, Homo sapiens
tccggcagtagagctcgctg

SEQ ID NO: 13088 - DNA, 18 bp, Homo sapiens
tccggcagttactcccag

SEQ ID NO: 13089 - DNA, 19 bp, Homo sapiens
tccggccatgcggggcctc

SEQ ID NO: 13090 - DNA, 18 bp, Homo sapiens
tccggccgccctttgcgc

SEQ ID NO: 13091 - DNA, 19 bp, Homo sapiens
tccggcctggccccggagg

SEQ ID NO: 13092 - DNA, 14 bp, Homo sapiens
tccggcgcagtgtt

SEQ ID NO: 13093 - DNA, 19 bp, Homo sapiens
tccggcggctcctctatca

SEQ ID NO: 13094 - DNA, 21 bp, Homo sapiens
tccggcggctcctctatcagg

SEQ ID NO: 13095 - DNA, 16 bp, Homo sapiens
tccggcggtgacgacc

SEQ ID NO: 13096 - DNA, 17 bp, Homo sapiens
tccggcggtgacgacct

SEQ ID NO: 13097 - DNA, 18 bp, Homo sapiens
tccggcggtgacgaccta

SEQ ID NO: 13098 - DNA, 19 bp, Homo sapiens
tccggctcgaattgctctc

SEQ ID NO: 13099 - DNA, 18 bp, Homo sapiens
tccggctgcagccgcggg

SEQ ID NO: 13100 - DNA, 18 bp, Homo sapiens
tccggctgcgagaaagga

SEQ ID NO: 13101 - DNA, 18 bp, Homo sapiens
tccggctggaaccatgga

SEQ ID NO: 13102 - DNA, 17 bp, Homo sapiens
tccggctggggaagatg

SEQ ID NO: 13103 - DNA, 18 bp, Homo sapiens
tccggctggggaagatgg

SEQ ID NO: 13104 - DNA, 19 bp, Homo sapiens
tccggctggggaagatggc

SEQ ID NO: 13105 - DNA, 14 bp, Homo sapiens
cggccgttgggatg

SEQ ID NO: 13106 - DNA, 19 bp, Homo sapiens
cggcctagagcggcagacg

SEQ ID NO: 13107 - DNA, 16 bp, Homo sapiens
cggcctagcgagtggt

SEQ ID NO: 13108 - DNA, 18 bp, Homo sapiens
cggcctccaaggggcggg

SEQ ID NO: 13109 - DNA, 18 bp, Homo sapiens
cggcctccggcggctccg

SEQ ID NO: 13110 - DNA, 23 bp, Homo sapiens
cggcctcgtactcgcgcgtgcac

SEQ ID NO: 13111 - DNA, 23 bp, Homo sapiens
cggcctctgcctggatctcggcg

SEQ ID NO: 13112 - DNA, 21 bp, Homo sapiens
cggcctgagagcgggccgagg

SEQ ID NO: 13113 - DNA, 18 bp, Homo sapiens
cggcctgagaggtctctc

SEQ ID NO: 13114 - DNA, 23 bp, Homo sapiens
cggcctgggccggcggcctcctg

SEQ ID NO: 13115 - DNA, 18 bp, Homo sapiens
cggcctgggcgcagcgac

SEQ ID NO: 13116 - DNA, 17 bp, Homo sapiens
cggcctggggcggaaaa

SEQ ID NO: 13117 - DNA, 17 bp, Homo sapiens
cggcctgtgcgagtagg

SEQ ID NO: 13118 - DNA, 21 bp, Homo sapiens
cggcctgtgtctatggtcggg

SEQ ID NO: 13119 - DNA, 19 bp, Homo sapiens
cggccttgagtgaaaccgg

SEQ ID NO: 13120 - DNA, 18 bp, Homo sapiens
cggcctttgctgcgggcg

SEQ ID NO: 13121 - DNA, 22 bp, Homo sapiens
cggcctttgtctcttgctgcag

SEQ ID NO: 13122 - DNA, 19 bp, Homo sapiens
cggcgaactggctggagga

SEQ ID NO: 13123 - DNA, 18 bp, Homo sapiens
cggcgaagtgggagagag

SEQ ID NO: 13124 - DNA, 18 bp, Homo sapiens
cggcgacattagctagcg

SEQ ID NO: 13125 - DNA, 16 bp, Homo sapiens
cggcgaccgcgccagc

SEQ ID NO: 13126 - DNA, 18 bp, Homo sapiens
cggcgacggtagaacggg

SEQ ID NO: 13127 - DNA, 18 bp, Homo sapiens
cggcgactgaggagggcg

SEQ ID NO: 13128 - DNA, 17 bp, Homo sapiens
cggcgagaggcgggctg

SEQ ID NO: 13129 - DNA, 18 bp, Homo sapiens
cggcgagaggcgggctga

SEQ ID NO: 13130 - DNA, 18 bp, Homo sapiens
cggcgagcagagcgcagc

SEQ ID NO: 13131 - DNA, 16 bp, Homo sapiens
cggcgagctagcggac

SEQ ID NO: 13132 - DNA, 17 bp, Homo sapiens
cggcgaggaataggaat

SEQ ID NO: 13133 - DNA, 18 bp, Homo sapiens
cggcgaggaataggaatc

SEQ ID NO: 13134 - DNA, 18 bp, Homo sapiens
cggcgaggatggagggcc

SEQ ID NO: 13135 - DNA, 18 bp, Homo sapiens
cggcgaggccggccgcga

SEQ ID NO: 13136 - DNA, 18 bp, Homo sapiens
cggcgaggcggcggccta

SEQ ID NO: 13137 - DNA, 16 bp, Homo sapiens
cggcgagggcggcccg

SEQ ID NO: 13138 - DNA, 18 bp, Homo sapiens
cggcgagtagcggagcgg

SEQ ID NO: 13139 - DNA, 17 bp, Homo sapiens
cggcgagtcttaggggc

SEQ ID NO: 13140 - DNA, 20 bp, Homo sapiens
cggcgatatggaagatgggc

SEQ ID NO: 13141 - DNA, 22 bp, Homo sapiens
cggcgatggagtggtgggctag

SEQ ID NO: 13142 - DNA, 17 bp, Homo sapiens
cggcgatggggagcggc

SEQ ID NO: 13143 - DNA, 18 bp, Homo sapiens
cggcgcagaggaggagct

SEQ ID NO: 13144 - DNA, 19 bp, Homo sapiens
cggcgcagaggaggagctt

SEQ ID NO: 13145 - DNA, 20 bp, Homo sapiens
cggcgcagaggaggagcttg

SEQ ID NO: 13146 - DNA, 17 bp, Homo sapiens
cggcgcagcaagatccc

SEQ ID NO: 13147 - DNA, 19 bp, Homo sapiens
cggcgcagcgaacgagcag

SEQ ID NO: 13148 - DNA, 19 bp, Homo sapiens
cggcgcaggaggcgagcgg

SEQ ID NO: 13149 - DNA, 18 bp, Homo sapiens
cggcgcagtagcagcgag

SEQ ID NO: 13150 - DNA, 16 bp, Homo sapiens
cggcgcagtgttggga

SEQ ID NO: 13151 - DNA, 17 bp, Homo sapiens
cggcgcagtgttgggac

SEQ ID NO: 13152 - DNA, 19 bp, Homo sapiens
cggcgcagtgttgggactg

SEQ ID NO: 13153 - DNA, 18 bp, Homo sapiens
cggcgcatggcggtgagc

SEQ ID NO: 13154 - DNA, 18 bp, Homo sapiens
cggcgccagctgagccga

SEQ ID NO: 13155 - DNA, 19 bp, Homo sapiens
cggcgccaggaggagccgc

SEQ ID NO: 13156 - DNA, 20 bp, Homo sapiens
cggcgccatccctatagaga

SEQ ID NO: 13157 - DNA, 17 bp, Homo sapiens
cggcgcccagaggctgc

SEQ ID NO: 13158 - DNA, 20 bp, Homo sapiens
cggcgcccagaggctgctga

SEQ ID NO: 13159 - DNA, 17 bp, Homo sapiens
cggcgcccagcggaggg

SEQ ID NO: 13160 - DNA, 20 bp, Homo sapiens
cggcgcccagtgcaggatgg

SEQ ID NO: 13161 - DNA, 17 bp, Homo sapiens
cggcgccccgcgcagtg

SEQ ID NO: 13162 - DNA, 17 bp, Homo sapiens
tccggctggggtagcgg

SEQ ID NO: 13163 - DNA, 17 bp, Homo sapiens
tccgggagccaacatgc

SEQ ID NO: 13164 - DNA, 18 bp, Homo sapiens
tccgggagccaacatgcc

SEQ ID NO: 13165 - DNA, 18 bp, Homo sapiens
tccgggaggtcgggctgt

SEQ ID NO: 13166 - DNA, 17 bp, Homo sapiens
tccgggagtcttgcagt

SEQ ID NO: 13167 - DNA, 18 bp, Homo sapiens
tccgggcccgagtgatgg

SEQ ID NO: 13168 - DNA, 19 bp, Homo sapiens
tccgggcgggcaggcggcg

SEQ ID NO: 13169 - DNA, 21 bp, Homo sapiens
tccgggctctgggtggcggcg

SEQ ID NO: 13170 - DNA, 18 bp, Homo sapiens
tccgggctgagtgcttcc

SEQ ID NO: 13171 - DNA, 21 bp, Homo sapiens
tccgggctgtaagtgccccga

SEQ ID NO: 13172 - DNA, 18 bp, Homo sapiens
tccgggcttgcagacgag

SEQ ID NO: 13173 - DNA, 18 bp, Homo sapiens
tccggggaagggttttgc

SEQ ID NO: 13174 - DNA, 18 bp, Homo sapiens
tccggggacagttagggc

SEQ ID NO: 13175 - DNA, 17 bp, Homo sapiens
tccggggagaaagacgc

SEQ ID NO: 13176 - DNA, 18 bp, Homo sapiens
tccggggagcaagggcca

SEQ ID NO: 13177 - DNA, 20 bp, Homo sapiens
tccggggcgaccgccgcgag

SEQ ID NO: 13178 - DNA, 18 bp, Homo sapiens
tccggggctgagggaagg

SEQ ID NO: 13179 - DNA, 20 bp, Homo sapiens
tccgggggaggagggcggag

SEQ ID NO: 13180 - DNA, 19 bp, Homo sapiens
tccgggtccgctgcctggc

SEQ ID NO: 13181 - DNA, 18 bp, Homo sapiens
tccgggtcgaagagcgca

SEQ ID NO: 13182 - DNA, 18 bp, Homo sapiens
tccgggtcgggacactgc

SEQ ID NO: 13183 - DNA, 17 bp, Homo sapiens
tccgggttaggcggctg

SEQ ID NO: 13184 - DNA, 18 bp, Homo sapiens
tccggtaggagagcggtg

SEQ ID NO: 13185 - DNA, 18 bp, Homo sapiens
tccggtcaataaaatcga

SEQ ID NO: 13186 - DNA, 19 bp, Homo sapiens
tccggtcaggcgtcgggac

SEQ ID NO: 13187 - DNA, 20 bp, Homo sapiens
tccggtcgctgccgccacca

SEQ ID NO: 13188 - DNA, 18 bp, Homo sapiens
tccggtctgtggtgcagc

SEQ ID NO: 13189 - DNA, 15 bp, Homo sapiens
tccggtgacggacca

SEQ ID NO: 13190 - DNA, 17 bp, Homo sapiens
tccggtgcagtgaaggc

SEQ ID NO: 13191 - DNA, 18 bp, Homo sapiens
tccggtgctgctgaggag

SEQ ID NO: 13192 - DNA, 16 bp, Homo sapiens
tccggtggaagggagc

SEQ ID NO: 13193 - DNA, 19 bp, Homo sapiens
tccggtggcgactgcggcg

SEQ ID NO: 13194 - DNA, 18 bp, Homo sapiens
tccggtggtaggggagcg

SEQ ID NO: 13195 - DNA, 16 bp, Homo sapiens
tccggtttaaccgtca

SEQ ID NO: 13196 - DNA, 18 bp, Homo sapiens
tccgtacgtcggagtcct

SEQ ID NO: 13197 - DNA, 19 bp, Homo sapiens
tccgtagaaggcagcgcgg

SEQ ID NO: 13198 - DNA, 21 bp, Homo sapiens
tccgtcacatgacagcagatc

SEQ ID NO: 13199 - DNA, 17 bp, Homo sapiens
tccgtcacggctccggc

SEQ ID NO: 13200 - DNA, 20 bp, Homo sapiens
tccgtcgccgccaagatgat

SEQ ID NO: 13201 - DNA, 21 bp, Homo sapiens
tccgtcggcgtgtgttttggg

SEQ ID NO: 13202 - DNA, 17 bp, Homo sapiens
tccgtcgtggcctggcg

SEQ ID NO: 13203 - DNA, 18 bp, Homo sapiens
tccgtctcaggtcgccgc

SEQ ID NO: 13204 - DNA, 22 bp, Homo sapiens
tccgtgcggaggctgagccggc

SEQ ID NO: 13205 - DNA, 21 bp, Homo sapiens
tccgtgggattcgcgctccac

SEQ ID NO: 13206 - DNA, 18 bp, Homo sapiens
tccgtgggtggggtcccc

SEQ ID NO: 13207 - DNA, 24 bp, Homo sapiens
tccgttcaacgaagtggttgcttt

SEQ ID NO: 13208 - DNA, 18 bp, Homo sapiens
tccgttctttgttctgtc

SEQ ID NO: 13209 - DNA, 17 bp, Homo sapiens
tccgttggccgaggggg

SEQ ID NO: 13210 - DNA, 17 bp, Homo sapiens
tcctaaccaaggtgctc

SEQ ID NO: 13211 - DNA, 17 bp, Homo sapiens
tcctagagcggacaggg

SEQ ID NO: 13212 - DNA, 21 bp, Homo sapiens
tcctagagcggacagggcgat

SEQ ID NO: 13213 - DNA, 18 bp, Homo sapiens
tcctagctgaacagcgcg

SEQ ID NO: 13214 - DNA, 20 bp, Homo sapiens
tcctaggaggcgctggctct

SEQ ID NO: 13215 - DNA, 18 bp, Homo sapiens
tcctagttaaggcggcac

SEQ ID NO: 13216 - DNA, 18 bp, Homo sapiens
tcctatccatggtgttga

SEQ ID NO: 13217 - DNA, 18 bp, Homo sapiens
tcctcaacagcagcactt

SEQ ID NO: 13218 - DNA, 18 bp, Homo sapiens
tcctcagatcggtggacg

SEQ ID NO: 13219 - DNA, 19 bp, Homo sapiens
cggcgcccgcggagtcgct

SEQ ID NO: 13220 - DNA, 22 bp, Homo sapiens
cggcgcccgctctgcccgccgc

SEQ ID NO: 13221 - DNA, 21 bp, Homo sapiens
cggcgccctgtgagggacaag

SEQ ID NO: 13222 - DNA, 18 bp, Homo sapiens
cggcgccgcaggggattg

SEQ ID NO: 13223 - DNA, 20 bp, Homo sapiens
cggcgccgctgctgtggcaa

SEQ ID NO: 13224 - DNA, 18 bp, Homo sapiens
cggcgccggagagatggc

SEQ ID NO: 13225 - DNA, 20 bp, Homo sapiens
cggcgccggagagatggcgg

SEQ ID NO: 13226 - DNA, 17 bp, Homo sapiens
cggcgccggcagaggag

SEQ ID NO: 13227 - DNA, 19 bp, Homo sapiens
cggcgccggcgccattttg

SEQ ID NO: 13228 - DNA, 18 bp, Homo sapiens
cggcgccgggcgagtggc

SEQ ID NO: 13229 - DNA, 19 bp, Homo sapiens
cggcgcctgcgcagaacgc

SEQ ID NO: 13230 - DNA, 17 bp, Homo sapiens
cggcgcgaaggtggctc

SEQ ID NO: 13231 - DNA, 20 bp, Homo sapiens
cggcgcgatgggagacgaga

SEQ ID NO: 13232 - DNA, 18 bp, Homo sapiens
cggcgcggagcggaccgg

SEQ ID NO: 13233 - DNA, 21 bp, Homo sapiens
cggcgcggagctggacgccgc

SEQ ID NO: 13234 - DNA, 21 bp, Homo sapiens
cggcgcggaggagctggagga

SEQ ID NO: 13235 - DNA, 21 bp, Homo sapiens
cggcgcggcagcggagcgcag

SEQ ID NO: 13236 - DNA, 19 bp, Homo sapiens
cggcgcggcagctgtctgg

SEQ ID NO: 13237 - DNA, 19 bp, Homo sapiens
cggcgcggcgactgaagcg

SEQ ID NO: 13238 - DNA, 18 bp, Homo sapiens
cggcgcggcgctagcctc

SEQ ID NO: 13239 - DNA, 18 bp, Homo sapiens
cggcgcggcggcgagtgc

SEQ ID NO: 13240 - DNA, 18 bp, Homo sapiens
cggcgcgggagggctgtg

SEQ ID NO: 13241 - DNA, 20 bp, Homo sapiens
cggcgcggggagggcgctga

SEQ ID NO: 13242 - DNA, 18 bp, Homo sapiens
cggcgcggggcctgggat

SEQ ID NO: 13243 - DNA, 18 bp, Homo sapiens
cggcgcgtggtctacgcc

SEQ ID NO: 13244 - DNA, 19 bp, Homo sapiens
cggcgcgtggtctacgccg

SEQ ID NO: 13245 - DNA, 18 bp, Homo sapiens
cggcgctaagccgggaga

SEQ ID NO: 13246 - DNA, 19 bp, Homo sapiens
cggcgctacactagagcag

SEQ ID NO: 13247 - DNA, 18 bp, Homo sapiens
cggcgctaggggaacccg

SEQ ID NO: 13248 - DNA, 18 bp, Homo sapiens
cggcgctcacaattgcca

SEQ ID NO: 13249 - DNA, 17 bp, Homo sapiens
cggcgctcggccccacc

SEQ ID NO: 13250 - DNA, 18 bp, Homo sapiens
cggcgctcggccccaccc

SEQ ID NO: 13251 - DNA, 17 bp, Homo sapiens
cggcgctcgtccggccc

SEQ ID NO: 13252 - DNA, 16 bp, Homo sapiens
cggcgctgaaggagga

SEQ ID NO: 13253 - DNA, 19 bp, Homo sapiens
cggcgctgaccaccgcgcg

SEQ ID NO: 13254 - DNA, 18 bp, Homo sapiens
cggcgctgcgtagaagta

SEQ ID NO: 13255 - DNA, 18 bp, Homo sapiens
cggcgctgggaggtggag

SEQ ID NO: 13256 - DNA, 19 bp, Homo sapiens
cggcgctggggagggcgag

SEQ ID NO: 13257 - DNA, 16 bp, Homo sapiens
cggcgctgtcggatac

SEQ ID NO: 13258 - DNA, 17 bp, Homo sapiens
cggcgctgtcggatact

SEQ ID NO: 13259 - DNA, 18 bp, Homo sapiens
cggcgctgtgtcggaccc

SEQ ID NO: 13260 - DNA, 17 bp, Homo sapiens
cggcgctgttgaatggc

SEQ ID NO: 13261 - DNA, 18 bp, Homo sapiens
cggcgcttccgccttcgc

SEQ ID NO: 13262 - DNA, 22 bp, Homo sapiens
cggcgcttcctgttccggcgcc

SEQ ID NO: 13263 - DNA, 17 bp, Homo sapiens
cggcggaagcggagagc

SEQ ID NO: 13264 - DNA, 19 bp, Homo sapiens
cggcggaagcgggagcctc

SEQ ID NO: 13265 - DNA, 21 bp, Homo sapiens
cggcggacagtgagggcgcgg

SEQ ID NO: 13266 - DNA, 18 bp, Homo sapiens
cggcggacgcaggaggcc

SEQ ID NO: 13267 - DNA, 21 bp, Homo sapiens
cggcggagaaggaggcggagg

SEQ ID NO: 13268 - DNA, 17 bp, Homo sapiens
cggcggagagatggcct

SEQ ID NO: 13269 - DNA, 24 bp, Homo sapiens
cggcggagcgcaggcctcgtgccg

SEQ ID NO: 13270 - DNA, 17 bp, Homo sapiens
cggcggaggaagtgagg

SEQ ID NO: 13271 - DNA, 18 bp, Homo sapiens
cggcggaggaagtgagga

SEQ ID NO: 13272 - DNA, 19 bp, Homo sapiens
cggcggaggaagtgaggac

SEQ ID NO: 13273 - DNA, 21 bp, Homo sapiens
cggcggaggaagtgaggacgg

SEQ ID NO: 13274 - DNA, 18 bp, Homo sapiens
cggcggaggagcggatgg

SEQ ID NO: 13275 - DNA, 19 bp, Homo sapiens
cggcggaggagcggatggc

SEQ ID NO: 13276 - DNA, 23 bp, Homo sapiens
tcctcagggagggtgagtcggcg

SEQ ID NO: 13277 - DNA, 18 bp, Homo sapiens
tcctcattccggctgtgg

SEQ ID NO: 13278 - DNA, 22 bp, Homo sapiens
tcctccagagactgacgagtgc

SEQ ID NO: 13279 - DNA, 20 bp, Homo sapiens
tcctcccgcccagcagttcc

SEQ ID NO: 13280 - DNA, 17 bp, Homo sapiens
tcctcccgtcttgcgcc

SEQ ID NO: 13281 - DNA, 16 bp, Homo sapiens
tcctcctcctcagggc

SEQ ID NO: 13282 - DNA, 18 bp, Homo sapiens
tcctcgcccccacccaga

SEQ ID NO: 13283 - DNA, 18 bp, Homo sapiens
tcctcgccgggtctgtgc

SEQ ID NO: 13284 - DNA, 18 bp, Homo sapiens
tcctcgcggcgacatgga

SEQ ID NO: 13285 - DNA, 18 bp, Homo sapiens
tcctcgcgttcttgagtc

SEQ ID NO: 13286 - DNA, 18 bp, Homo sapiens
tcctcgcttcctccgcgg

SEQ ID NO: 13287 - DNA, 17 bp, Homo sapiens
tcctcgtcaggaagccc

SEQ ID NO: 13288 - DNA, 19 bp, Homo sapiens
tcctcgtggaaggttcgtg

SEQ ID NO: 13289 - DNA, 18 bp, Homo sapiens
tcctctagagaatggtgg

SEQ ID NO: 13290 - DNA, 19 bp, Homo sapiens
tcctctatcaggaagattg

SEQ ID NO: 13291 - DNA, 18 bp, Homo sapiens
tcctctctccaattttgc

SEQ ID NO: 13292 - DNA, 18 bp, Homo sapiens
tcctcttccggaaggcgg

SEQ ID NO: 13293 - DNA, 18 bp, Homo sapiens
tcctcttcttcttataaa

SEQ ID NO: 13294 - DNA, 18 bp, Homo sapiens
tcctcttgctaccctccc

SEQ ID NO: 13295 - DNA, 24 bp, Homo sapiens
tcctctttcctgtctgtcttcctc

SEQ ID NO: 13296 - DNA, 19 bp, Homo sapiens
tcctgaagctgacagcatt

SEQ ID NO: 13297 - DNA, 18 bp, Homo sapiens
tcctgaccccgcagtggg

SEQ ID NO: 13298 - DNA, 19 bp, Homo sapiens
tcctgagaggagtgaaggc

SEQ ID NO: 13299 - DNA, 17 bp, Homo sapiens
tcctgagcggccaggac

SEQ ID NO: 13300 - DNA, 20 bp, Homo sapiens
tcctgaggactaggaaggtg

SEQ ID NO: 13301 - DNA, 20 bp, Homo sapiens
tcctgaggctggcatctggg

SEQ ID NO: 13302 - DNA, 18 bp, Homo sapiens
tcctgaggtggagaacgg

SEQ ID NO: 13303 - DNA, 18 bp, Homo sapiens
tcctgcacccgcagaaaa

SEQ ID NO: 13304 - DNA, 17 bp, Homo sapiens
tcctgcagcgtctgggg

SEQ ID NO: 13305 - DNA, 18 bp, Homo sapiens
tcctgcagtgtttctgga

SEQ ID NO: 13306 - DNA, 16 bp, Homo sapiens
tcctgcgttgggattc

SEQ ID NO: 13307 - DNA, 18 bp, Homo sapiens
tcctgctggtgagggctc

SEQ ID NO: 13308 - DNA, 19 bp, Homo sapiens
tcctggtgtctgagcctgg

SEQ ID NO: 13309 - DNA, 19 bp, Homo sapiens
tcctggttccctgaagcat

SEQ ID NO: 13310 - DNA, 21 bp, Homo sapiens
tcctgtaccacccggctcaag

SEQ ID NO: 13311 - DNA, 18 bp, Homo sapiens
tcctgtgggacgtggtgg

SEQ ID NO: 13312 - DNA, 21 bp, Homo sapiens
tcctgtgggacgtggtggtag

SEQ ID NO: 13313 - DNA, 19 bp, Homo sapiens
tcctgtggtcatttgacgg

SEQ ID NO: 13314 - DNA, 19 bp, Homo sapiens
tcctgtgtttaccgataga

SEQ ID NO: 13315 - DNA, 16 bp, Homo sapiens
tcctgttgcaatggcg

SEQ ID NO: 13316 - DNA, 18 bp, Homo sapiens
tcctgttgcaatggcgag

SEQ ID NO: 13317 - DNA, 19 bp, Homo sapiens
tccttatagaaatagttga

SEQ ID NO: 13318 - DNA, 17 bp, Homo sapiens
tccttcttctcttccgg

SEQ ID NO: 13319 - DNA, 19 bp, Homo sapiens
tccttgaaagggttttggt

SEQ ID NO: 13320 - DNA, 21 bp, Homo sapiens
tccttggacttagagagtggg

SEQ ID NO: 13321 - DNA, 19 bp, Homo sapiens
tccttggaggtgaccaggg

SEQ ID NO: 13322 - DNA, 18 bp, Homo sapiens
tccttgtggagccggagc

SEQ ID NO: 13323 - DNA, 19 bp, Homo sapiens
tcctttttcgtctgggctg

SEQ ID NO: 13324 - DNA, 17 bp, Homo sapiens
tcctttttgcacacaca

SEQ ID NO: 13325 - DNA, 16 bp, Homo sapiens
tcctttttgtccgaca

SEQ ID NO: 13326 - DNA, 18 bp, Homo sapiens
tcgaactggaggaaggag

SEQ ID NO: 13327 - DNA, 19 bp, Homo sapiens
tcgacacttcgaacgcact

SEQ ID NO: 13328 - DNA, 18 bp, Homo sapiens
tcgacccgcagccgcggg

SEQ ID NO: 13329 - DNA, 19 bp, Homo sapiens
tcgactcactggtgcgcga

SEQ ID NO: 13330 - DNA, 21 bp, Homo sapiens
tcgagcttattctcttctagc

SEQ ID NO: 13331 - DNA, 18 bp, Homo sapiens
tcgaggagaacccagacc

SEQ ID NO: 13332 - DNA, 16 bp, Homo sapiens
tcgaggagcgggatgt

SEQ ID NO: 13333 - DNA, 20 bp, Homo sapiens
cggcggaggagcggatggca

SEQ ID NO: 13334 - DNA, 21 bp, Homo sapiens
cggcggaggcagagaccgagg

SEQ ID NO: 13335 - DNA, 18 bp, Homo sapiens
cggcggaggctgccatgg

SEQ ID NO: 13336 - DNA, 18 bp, Homo sapiens
cggcggagtagcaagtgg

SEQ ID NO: 13337 - DNA, 21 bp, Homo sapiens
cggcggagtagcaagtggcca

SEQ ID NO: 13338 - DNA, 17 bp, Homo sapiens
cggcggagtccgggacg

SEQ ID NO: 13339 - DNA, 16 bp, Homo sapiens
cggcggagtcggcgct

SEQ ID NO: 13340 - DNA, 14 bp, Homo sapiens
cggcggagtcgtca

SEQ ID NO: 13341 - DNA, 18 bp, Homo sapiens
cggcggagttggcggctt

SEQ ID NO: 13342 - DNA, 19 bp, Homo sapiens
cggcggcaacagcagacat

SEQ ID NO: 13343 - DNA, 19 bp, Homo sapiens
cggcggcaagcggtaccac

SEQ ID NO: 13344 - DNA, 18 bp, Homo sapiens
cggcggcacctgcgatca

SEQ ID NO: 13345 - DNA, 18 bp, Homo sapiens
cggcggcacgacgacggt

SEQ ID NO: 13346 - DNA, 16 bp, Homo sapiens
cggcggcagagaggat

SEQ ID NO: 13347 - DNA, 17 bp, Homo sapiens
cggcggcagagaggata

SEQ ID NO: 13348 - DNA, 22 bp, Homo sapiens
cggcggcagagctgtccggctg

SEQ ID NO: 13349 - DNA, 18 bp, Homo sapiens
cggcggcagcagcagcag

SEQ ID NO: 13350 - DNA, 18 bp, Homo sapiens
cggcggcagccgagggcg

SEQ ID NO: 13351 - DNA, 17 bp, Homo sapiens
cggcggcagctgcgagg

SEQ ID NO: 13352 - DNA, 21 bp, Homo sapiens
cggcggcaggagcaggacctg

SEQ ID NO: 13353 - DNA, 16 bp, Homo sapiens
cggcggcaggaggagg

SEQ ID NO: 13354 - DNA, 18 bp, Homo sapiens
cggcggcaggaggaggac

SEQ ID NO: 13355 - DNA, 18 bp, Homo sapiens
cggcggcagttgtggtgg

SEQ ID NO: 13356 - DNA, 19 bp, Homo sapiens
cggcggcatggcagggcgg

SEQ ID NO: 13357 - DNA, 20 bp, Homo sapiens
cggcggcattaaacggttgc

SEQ ID NO: 13358 - DNA, 17 bp, Homo sapiens
cggcggccagagaagag

SEQ ID NO: 13359 - DNA, 18 bp, Homo sapiens
cggcggccgagacggaca

SEQ ID NO: 13360 - DNA, 16 bp, Homo sapiens
cggcggccgcagcaag

SEQ ID NO: 13361 - DNA, 18 bp, Homo sapiens
cggcggccgccattttgt

SEQ ID NO: 13362 - DNA, 19 bp, Homo sapiens
cggcggccgctgggtgcag

SEQ ID NO: 13363 - DNA, 20 bp, Homo sapiens
cggcggccgctgggtgcagc

SEQ ID NO: 13364 - DNA, 17 bp, Homo sapiens
cggcggccggtggcagc

SEQ ID NO: 13365 - DNA, 23 bp, Homo sapiens
cggcggccggttcgggcggcggc

SEQ ID NO: 13366 - DNA, 20 bp, Homo sapiens
cggcggcgaagcggagagca

SEQ ID NO: 13367 - DNA, 24 bp, Homo sapiens
cggcggcgacggctgttgctaagg

SEQ ID NO: 13368 - DNA, 20 bp, Homo sapiens
cggcggcgagagcagaggac

SEQ ID NO: 13369 - DNA, 16 bp, Homo sapiens
cggcggcgagaggatg

SEQ ID NO: 13370 - DNA, 17 bp, Homo sapiens
cggcggcgagaggatga

SEQ ID NO: 13371 - DNA, 18 bp, Homo sapiens
cggcggcgagcggacggc

SEQ ID NO: 13372 - DNA, 17 bp, Homo sapiens
cggcggcgagcggttcc

SEQ ID NO: 13373 - DNA, 19 bp, Homo sapiens
cggcggcgattcctcctcc

SEQ ID NO: 13374 - DNA, 22 bp, Homo sapiens
cggcggcgcacgctgttgcccc

SEQ ID NO: 13375 - DNA, 16 bp, Homo sapiens
cggcggcgcagaaatg

SEQ ID NO: 13376 - DNA, 19 bp, Homo sapiens
cggcggcgcaggagttata

SEQ ID NO: 13377 - DNA, 18 bp, Homo sapiens
cggcggcgcagtaaacag

SEQ ID NO: 13378 - DNA, 21 bp, Homo sapiens
cggcggcgcggaggaagagag

SEQ ID NO: 13379 - DNA, 19 bp, Homo sapiens
cggcggcgcggccatgaag

SEQ ID NO: 13380 - DNA, 19 bp, Homo sapiens
cggcggcgcttggcagcca

SEQ ID NO: 13381 - DNA, 18 bp, Homo sapiens
cggcggcggaggctgcca

SEQ ID NO: 13382 - DNA, 17 bp, Homo sapiens
cggcggcggagtccggg

SEQ ID NO: 13383 - DNA, 18 bp, Homo sapiens
cggcggcggcagtggggc

SEQ ID NO: 13384 - DNA, 18 bp, Homo sapiens
cggcggcggccactgcca

SEQ ID NO: 13385 - DNA, 18 bp, Homo sapiens
cggcggcggcgagagcag

SEQ ID NO: 13386 - DNA, 18 bp, Homo sapiens
cggcggcggcggcagcgg

SEQ ID NO: 13387 - DNA, 24 bp, Homo sapiens
cggcggcggcggcggcggcggcgg

SEQ ID NO: 13388 - DNA, 19 bp, Homo sapiens
cggcggcggcggcggtaaa

SEQ ID NO: 13389 - DNA, 23 bp, Homo sapiens
cggcggcggcgggggcgcttcgg

SEQ ID NO: 13390 - DNA, 19 bp, Homo sapiens
tcgaggagcgggatgttgc

SEQ ID NO: 13391 - DNA, 18 bp, Homo sapiens
tcgaggagctgctgctgc

SEQ ID NO: 13392 - DNA, 18 bp, Homo sapiens
tcgatcctgggttggagg

SEQ ID NO: 13393 - DNA, 18 bp, Homo sapiens
tcgatctcgccgccaact

SEQ ID NO: 13394 - DNA, 17 bp, Homo sapiens
tcgatgaccacgggctg

SEQ ID NO: 13395 - DNA, 13 bp, Homo sapiens
tcgattcccgtag

SEQ ID NO: 13396 - DNA, 18 bp, Homo sapiens
tcgcagactacggacctg

SEQ ID NO: 13397 - DNA, 15 bp, Homo sapiens
tcgcagagcggctag

SEQ ID NO: 13398 - DNA, 19 bp, Homo sapiens
tcgcagaggaagccgttgc

SEQ ID NO: 13399 - DNA, 16 bp, Homo sapiens
tcgcagggttgggatg

SEQ ID NO: 13400 - DNA, 16 bp, Homo sapiens
tcgcagtgcctgtagt

SEQ ID NO: 13401 - DNA, 23 bp, Homo sapiens
tcgcagtggtcgcttcttctcct

SEQ ID NO: 13402 - DNA, 22 bp, Homo sapiens
tcgccacttctcacttccgctt

SEQ ID NO: 13403 - DNA, 16 bp, Homo sapiens
tcgccagcaaccgagc

SEQ ID NO: 13404 - DNA, 19 bp, Homo sapiens
tcgccattttgtaaggttc

SEQ ID NO: 13405 - DNA, 22 bp, Homo sapiens
tcgcccaactcccagacacctc

SEQ ID NO: 13406 - DNA, 22 bp, Homo sapiens
tcgcccattggcggagacggtt

SEQ ID NO: 13407 - DNA, 18 bp, Homo sapiens
tcgcccccacccagaccc

SEQ ID NO: 13408 - DNA, 17 bp, Homo sapiens
tcgcccgggacttcatg

SEQ ID NO: 13409 - DNA, 15 bp, Homo sapiens
tcgccctggccatgg

SEQ ID NO: 13410 - DNA, 21 bp, Homo sapiens
tcgccgagcgcgagggcgggc

SEQ ID NO: 13411 - DNA, 18 bp, Homo sapiens
tcgccgcagtcactcacc

SEQ ID NO: 13412 - DNA, 16 bp, Homo sapiens
tcgccgccagcggctc

SEQ ID NO: 13413 - DNA, 18 bp, Homo sapiens
tcgccgcggactcaagat

SEQ ID NO: 13414 - DNA, 18 bp, Homo sapiens
tcgccgctaaaaattccg

SEQ ID NO: 13415 - DNA, 15 bp, Homo sapiens
tcgccgctggagccc

SEQ ID NO: 13416 - DNA, 18 bp, Homo sapiens
tcgccggcagccccagcc

SEQ ID NO: 13417 - DNA, 20 bp, Homo sapiens
tcgccggggctggggctgag

SEQ ID NO: 13418 - DNA, 18 bp, Homo sapiens
tcgccggtggccgcggca

SEQ ID NO: 13419 - DNA, 19 bp, Homo sapiens
tcgccgtccttgcaggctc

SEQ ID NO: 13420 - DNA, 17 bp, Homo sapiens
tcgccgtctccaaggtg

SEQ ID NO: 13421 - DNA, 16 bp, Homo sapiens
tcgccgtgggctgagc

SEQ ID NO: 13422 - DNA, 18 bp, Homo sapiens
tcgcgaagcctgggactg

SEQ ID NO: 13423 - DNA, 16 bp, Homo sapiens
tcgcgacggagccggg

SEQ ID NO: 13424 - DNA, 17 bp, Homo sapiens
tcgcgagaacttatgca

SEQ ID NO: 13425 - DNA, 18 bp, Homo sapiens
tcgcgagctgcgtgctcg

SEQ ID NO: 13426 - DNA, 17 bp, Homo sapiens
tcgcgatgtgtggcgac

SEQ ID NO: 13427 - DNA, 18 bp, Homo sapiens
tcgcgcagctgtgttcgc

SEQ ID NO: 13428 - DNA, 17 bp, Homo sapiens
tcgcgcgcacctgcggg

SEQ ID NO: 13429 - DNA, 19 bp, Homo sapiens
tcgcgcggccgggagcacg

SEQ ID NO: 13430 - DNA, 18 bp, Homo sapiens
tcgcgctcgggcagcctg

SEQ ID NO: 13431 - DNA, 18 bp, Homo sapiens
tcgcgctgggagaagact

SEQ ID NO: 13432 - DNA, 17 bp, Homo sapiens
tcgcggagagaaggagg

SEQ ID NO: 13433 - DNA, 17 bp, Homo sapiens
tcgcggagctcgggctg

SEQ ID NO: 13434 - DNA, 18 bp, Homo sapiens
tcgcggatagcagaggag

SEQ ID NO: 13435 - DNA, 16 bp, Homo sapiens
tcgcggccgtaggcta

SEQ ID NO: 13436 - DNA, 20 bp, Homo sapiens
tcgcggggcagctccggtcg

SEQ ID NO: 13437 - DNA, 18 bp, Homo sapiens
tcgcgggtcgcggacgct

SEQ ID NO: 13438 - DNA, 17 bp, Homo sapiens
tcgcgggttttgggccg

SEQ ID NO: 13439 - DNA, 18 bp, Homo sapiens
tcgcggtatcaggaattt

SEQ ID NO: 13440 - DNA, 20 bp, Homo sapiens
tcgcggtcggcgtgccccga

SEQ ID NO: 13441 - DNA, 20 bp, Homo sapiens
tcgcggtctgtagtgaaggt

SEQ ID NO: 13442 - DNA, 21 bp, Homo sapiens
tcgcggtgaggtggccccgcg

SEQ ID NO: 13443 - DNA, 18 bp, Homo sapiens
tcgcgtcgcggccgcgga

SEQ ID NO: 13444 - DNA, 18 bp, Homo sapiens
tcgcgttggaggccgcct

SEQ ID NO: 13445 - DNA, 18 bp, Homo sapiens
tcgctaaggagattgcgg

SEQ ID NO: 13446 - DNA, 18 bp, Homo sapiens
tcgctatgtctggacgtg

SEQ ID NO: 13447 - DNA, 18 bp, Homo sapiens
cggcggcggcggtataaa

SEQ ID NO: 13448 - DNA, 23 bp, Homo sapiens
cggcggcggctgaggaagaagcg

SEQ ID NO: 13449 - DNA, 21 bp, Homo sapiens
cggcggcggctgtgtccggtg

SEQ ID NO: 13450 - DNA, 21 bp, Homo sapiens
cggcggcgggagcggcgtcga

SEQ ID NO: 13451 - DNA, 20 bp, Homo sapiens
cggcggcgggcgcagctagc

SEQ ID NO: 13452 - DNA, 17 bp, Homo sapiens
cggcggcgggtggcctg

SEQ ID NO: 13453 - DNA, 17 bp, Homo sapiens
cggcggcgggtgtactg

SEQ ID NO: 13454 - DNA, 21 bp, Homo sapiens
cggcggcgggttggcgcccca

SEQ ID NO: 13455 - DNA, 18 bp, Homo sapiens
cggcggcgggtttgctga

SEQ ID NO: 13456 - DNA, 20 bp, Homo sapiens
cggcggcggtagccaggctg

SEQ ID NO: 13457 - DNA, 15 bp, Homo sapiens
cggcggcggtatctg

SEQ ID NO: 13458 - DNA, 18 bp, Homo sapiens
cggcggcggtggtggttg

SEQ ID NO: 13459 - DNA, 16 bp, Homo sapiens
cggcggcggttgcccg

SEQ ID NO: 13460 - DNA, 15 bp, Homo sapiens
cggcggcgttgaggc

SEQ ID NO: 13461 - DNA, 18 bp, Homo sapiens
cggcggcgtttgagtgga

SEQ ID NO: 13462 - DNA, 19 bp, Homo sapiens
cggcggctatgccgcttgc

SEQ ID NO: 13463 - DNA, 18 bp, Homo sapiens
cggcggctccgggtttgg

SEQ ID NO: 13464 - DNA, 18 bp, Homo sapiens
cggcggctgatggcggat

SEQ ID NO: 13465 - DNA, 19 bp, Homo sapiens
cggcggctgcggcgcgcgc

SEQ ID NO: 13466 - DNA, 18 bp, Homo sapiens
cggcgggacctcggcgga

SEQ ID NO: 13467 - DNA, 19 bp, Homo sapiens
cggcgggagagcggcgggg

SEQ ID NO: 13468 - DNA, 17 bp, Homo sapiens
cggcgggagcatggagc

SEQ ID NO: 13469 - DNA, 18 bp, Homo sapiens
cggcgggagcgcccagac

SEQ ID NO: 13470 - DNA, 16 bp, Homo sapiens
cggcgggaggggaaac

SEQ ID NO: 13471 - DNA, 18 bp, Homo sapiens
cggcgggcaccggccgac

SEQ ID NO: 13472 - DNA, 20 bp, Homo sapiens
cggcgggcactggggccccg

SEQ ID NO: 13473 - DNA, 19 bp, Homo sapiens
cggcgggcagcggacgggc

SEQ ID NO: 13474 - DNA, 21 bp, Homo sapiens
cggcgggccaggcccctcccc

SEQ ID NO: 13475 - DNA, 20 bp, Homo sapiens
cggcgggcccgacgccaggc

SEQ ID NO: 13476 - DNA, 18 bp, Homo sapiens
cggcgggccgcagaggtg

SEQ ID NO: 13477 - DNA, 20 bp, Homo sapiens
cggcgggccgggaggctgag

SEQ ID NO: 13478 - DNA, 18 bp, Homo sapiens
cggcgggcgcaggacgtg

SEQ ID NO: 13479 - DNA, 20 bp, Homo sapiens
cggcgggcggagcggcctgc

SEQ ID NO: 13480 - DNA, 21 bp, Homo sapiens
cggcgggcggagcggcctgca

SEQ ID NO: 13481 - DNA, 23 bp, Homo sapiens
cggcgggcggagcggcctgcagc

SEQ ID NO: 13482 - DNA, 21 bp, Homo sapiens
cggcgggcggcgcggacagcc

SEQ ID NO: 13483 - DNA, 17 bp, Homo sapiens
cggcgggcggctgaggc

SEQ ID NO: 13484 - DNA, 14 bp, Homo sapiens
cggcgggctgccac

SEQ ID NO: 13485 - DNA, 19 bp, Homo sapiens
cggcggggaagcggcctgg

SEQ ID NO: 13486 - DNA, 19 bp, Homo sapiens
cggcggggaggcccccgcg

SEQ ID NO: 13487 - DNA, 18 bp, Homo sapiens
cggcggggatgctgagga

SEQ ID NO: 13488 - DNA, 23 bp, Homo sapiens
cggcggggcggcggagccgtcgg

SEQ ID NO: 13489 - DNA, 24 bp, Homo sapiens
cggcggggcggcggagccgtcggc

SEQ ID NO: 13490 - DNA, 15 bp, Homo sapiens
cggcggggctgaaga

SEQ ID NO: 13491 - DNA, 18 bp, Homo sapiens
cggcggggctgggcctcg

SEQ ID NO: 13492 - DNA, 20 bp, Homo sapiens
cggcgggggcggagtccgcc

SEQ ID NO: 13493 - DNA, 20 bp, Homo sapiens
cggcgggtcggttaggctgg

SEQ ID NO: 13494 - DNA, 20 bp, Homo sapiens
cggcgggtggcacccgtcgg

SEQ ID NO: 13495 - DNA, 23 bp, Homo sapiens
cggcggtacgcaaggctggagcc

SEQ ID NO: 13496 - DNA, 20 bp, Homo sapiens
cggcggtactgggatgggta

SEQ ID NO: 13497 - DNA, 18 bp, Homo sapiens
cggcggtagcagtggcaa

SEQ ID NO: 13498 - DNA, 18 bp, Homo sapiens
cggcggtagcggcagtgg

SEQ ID NO: 13499 - DNA, 18 bp, Homo sapiens
cggcggtatggtcgccgc

SEQ ID NO: 13500 - DNA, 19 bp, Homo sapiens
cggcggtcccgcgggtctg

SEQ ID NO: 13501 - DNA, 18 bp, Homo sapiens
cggcggtcgccacctctt

SEQ ID NO: 13502 - DNA, 19 bp, Homo sapiens
cggcggtgacaacgacggc

SEQ ID NO: 13503 - DNA, 18 bp, Homo sapiens
cggcggtgacccggactg

SEQ ID NO: 13504 - DNA, 17 bp, Homo sapiens
tcgctcgccgcctcgcg

SEQ ID NO: 13505 - DNA, 18 bp, Homo sapiens
tcgctcgccggcgccatc

SEQ ID NO: 13506 - DNA, 22 bp, Homo sapiens
tcgctctcctttcgttgcctga

SEQ ID NO: 13507 - DNA, 18 bp, Homo sapiens
tcgctcttctattaagtc

SEQ ID NO: 13508 - DNA, 18 bp, Homo sapiens
tcgctgactcgcgggctg

SEQ ID NO: 13509 - DNA, 21 bp, Homo sapiens
tcgctgagagctgggaagagg

SEQ ID NO: 13510 - DNA, 21 bp, Homo sapiens
tcgctgcagcccctggccctc

SEQ ID NO: 13511 - DNA, 24 bp, Homo sapiens
tcgctgcgccggttgctgcggctc

SEQ ID NO: 13512 - DNA, 20 bp, Homo sapiens
tcgctgtggggcaatccggg

SEQ ID NO: 13513 - DNA, 19 bp, Homo sapiens
tcggaacgagactgcacgg

SEQ ID NO: 13514 - DNA, 16 bp, Homo sapiens
tcggacacggatgagc

SEQ ID NO: 13515 - DNA, 18 bp, Homo sapiens
tcggaccaacggacgcgc

SEQ ID NO: 13516 - DNA, 22 bp, Homo sapiens
tcggaccagccggccggcggaa

SEQ ID NO: 13517 - DNA, 17 bp, Homo sapiens
tcggacgctattgccct

SEQ ID NO: 13518 - DNA, 21 bp, Homo sapiens
tcggacgggcgcggagacgct

SEQ ID NO: 13519 - DNA, 17 bp, Homo sapiens
tcggactaccgttggtt

SEQ ID NO: 13520 - DNA, 19 bp, Homo sapiens
tcggactaccgttggtttc

SEQ ID NO: 13521 - DNA, 18 bp, Homo sapiens
tcggactggtcatacggc

SEQ ID NO: 13522 - DNA, 17 bp, Homo sapiens
tcggactgtgatggctg

SEQ ID NO: 13523 - DNA, 20 bp, Homo sapiens
tcggactgtgatggctgtgg

SEQ ID NO: 13524 - DNA, 18 bp, Homo sapiens
tcggagacgaggacacgg

SEQ ID NO: 13525 - DNA, 16 bp, Homo sapiens
tcggagagactgcctc

SEQ ID NO: 13526 - DNA, 18 bp, Homo sapiens
tcggagaggcagcgcggt

SEQ ID NO: 13527 - DNA, 20 bp, Homo sapiens
tcggagaggcatctgggttc

SEQ ID NO: 13528 - DNA, 18 bp, Homo sapiens
tcggagcaggcagagcag

SEQ ID NO: 13529 - DNA, 20 bp, Homo sapiens
tcggagcgaagcggctggcg

SEQ ID NO: 13530 - DNA, 18 bp, Homo sapiens
tcggagcgaggagacccg

SEQ ID NO: 13531 - DNA, 18 bp, Homo sapiens
tcggagcgaggtggcgag

SEQ ID NO: 13532 - DNA, 18 bp, Homo sapiens
tcggagcggatcggagca

SEQ ID NO: 13533 - DNA, 14 bp, Homo sapiens
tcggaggcgttcag

SEQ ID NO: 13534 - DNA, 18 bp, Homo sapiens
tcggagtagagatggccg

SEQ ID NO: 13535 - DNA, 21 bp, Homo sapiens
tcggagtgtggcagtgctggg

SEQ ID NO: 13536 - DNA, 16 bp, Homo sapiens
tcggatcacaaggcgg

SEQ ID NO: 13537 - DNA, 19 bp, Homo sapiens
tcggatcgcctggagaggc

SEQ ID NO: 13538 - DNA, 17 bp, Homo sapiens
tcggcaaggagagacgt

SEQ ID NO: 13539 - DNA, 18 bp, Homo sapiens
tcggcactgagagtcccg

SEQ ID NO: 13540 - DNA, 18 bp, Homo sapiens
tcggcagagctgcgccgc

SEQ ID NO: 13541 - DNA, 18 bp, Homo sapiens
tcggcagagggcgcttcg

SEQ ID NO: 13542 - DNA, 20 bp, Homo sapiens
tcggcagagggcgcttcgac

SEQ ID NO: 13543 - DNA, 18 bp, Homo sapiens
tcggcagcagcggtccca

SEQ ID NO: 13544 - DNA, 18 bp, Homo sapiens
tcggcagcggtagcggct

SEQ ID NO: 13545 - DNA, 18 bp, Homo sapiens
tcggcagctgctgtagcg

SEQ ID NO: 13546 - DNA, 18 bp, Homo sapiens
tcggcaggcgagaggcgt

SEQ ID NO: 13547 - DNA, 18 bp, Homo sapiens
tcggcaggctggcaggct

SEQ ID NO: 13548 - DNA, 19 bp, Homo sapiens
tcggccgccgcaatgcagg

SEQ ID NO: 13549 - DNA, 18 bp, Homo sapiens
tcggccgttgtcaccatg

SEQ ID NO: 13550 - DNA, 20 bp, Homo sapiens
tcggcctcagcccgccgcag

SEQ ID NO: 13551 - DNA, 17 bp, Homo sapiens
tcggcctgcacggcggc

SEQ ID NO: 13552 - DNA, 19 bp, Homo sapiens
tcggcctggccgcgggtag

SEQ ID NO: 13553 - DNA, 19 bp, Homo sapiens
tcggccttgtaggggcgaa

SEQ ID NO: 13554 - DNA, 19 bp, Homo sapiens
tcggcgaggacagcggcgc

SEQ ID NO: 13555 - DNA, 19 bp, Homo sapiens
tcggcgcctggaaagatgg

SEQ ID NO: 13556 - DNA, 19 bp, Homo sapiens
tcggcgcgggaaccagggg

SEQ ID NO: 13557 - DNA, 19 bp, Homo sapiens
tcggcgctgccgggtgaaa

SEQ ID NO: 13558 - DNA, 18 bp, Homo sapiens
tcggcggatgcggcagcc

SEQ ID NO: 13559 - DNA, 19 bp, Homo sapiens
tcggcggcagctctgctgg

SEQ ID NO: 13560 - DNA, 19 bp, Homo sapiens
tcggcggcctgtcgggtaa

SEQ ID NO: 13561 - DNA, 19 bp, Homo sapiens
cggcggtgacccggactgc

SEQ ID NO: 13562 - DNA, 17 bp, Homo sapiens
cggcggtgcacctcacg

SEQ ID NO: 13563 - DNA, 18 bp, Homo sapiens
cggcggtggaaaggtgat

SEQ ID NO: 13564 - DNA, 19 bp, Homo sapiens
cggcggtggtcttgcggga

SEQ ID NO: 13565 - DNA, 19 bp, Homo sapiens
cggcggttttggctgtgtg

SEQ ID NO: 13566 - DNA, 19 bp, Homo sapiens
cggcgtactggcctggtcc

SEQ ID NO: 13567 - DNA, 19 bp, Homo sapiens
cggcgtagtggatgcagca

SEQ ID NO: 13568 - DNA, 18 bp, Homo sapiens
cggcgtcgaggcggggcg

SEQ ID NO: 13569 - DNA, 17 bp, Homo sapiens
cggcgtcgaggctggag

SEQ ID NO: 13570 - DNA, 18 bp, Homo sapiens
cggcgtcgaggctggagc

SEQ ID NO: 13571 - DNA, 18 bp, Homo sapiens
cggcgtcgagtgtctccg

SEQ ID NO: 13572 - DNA, 23 bp, Homo sapiens
cggcgtcgagtgtctccgtgcgc

SEQ ID NO: 13573 - DNA, 18 bp, Homo sapiens
cggcgtctgcgtctgcag

SEQ ID NO: 13574 - DNA, 17 bp, Homo sapiens
cggcgtgagctcgctga

SEQ ID NO: 13575 - DNA, 18 bp, Homo sapiens
cggcgtgagggctccggg

SEQ ID NO: 13576 - DNA, 18 bp, Homo sapiens
cggcgtgcgcggacagtg

SEQ ID NO: 13577 - DNA, 17 bp, Homo sapiens
cggcgtggtcttgcgag

SEQ ID NO: 13578 - DNA, 17 bp, Homo sapiens
cggcgtgtccttggact

SEQ ID NO: 13579 - DNA, 18 bp, Homo sapiens
cggcgtgtgctggcagct

SEQ ID NO: 13580 - DNA, 19 bp, Homo sapiens
cggcgttcgctggagctgg

SEQ ID NO: 13581 - DNA, 18 bp, Homo sapiens
cggcgtttctgcgtctgc

SEQ ID NO: 13582 - DNA, 17 bp, Homo sapiens
cggctaagcagagactg

SEQ ID NO: 13583 - DNA, 21 bp, Homo sapiens
cggctaatagcccggagacaa

SEQ ID NO: 13584 - DNA, 19 bp, Homo sapiens
cggctaccgcggcggcgca

SEQ ID NO: 13585 - DNA, 21 bp, Homo sapiens
cggctacctggagccggaagc

SEQ ID NO: 13586 - DNA, 22 bp, Homo sapiens
cggctacggcagtggagaagta

SEQ ID NO: 13587 - DNA, 19 bp, Homo sapiens
cggctagcggactcgagtc

SEQ ID NO: 13588 - DNA, 20 bp, Homo sapiens
cggctattttcgttggtgtg

SEQ ID NO: 13589 - DNA, 20 bp, Homo sapiens
cggctcaactggggagctgc

SEQ ID NO: 13590 - DNA, 17 bp, Homo sapiens
cggctcaagtggacagc

SEQ ID NO: 13591 - DNA, 17 bp, Homo sapiens
cggctcactgagacccg

SEQ ID NO: 13592 - DNA, 20 bp, Homo sapiens
cggctcaggcgggaggaccc

SEQ ID NO: 13593 - DNA, 18 bp, Homo sapiens
cggctcccagggtcgtcg

SEQ ID NO: 13594 - DNA, 24 bp, Homo sapiens
cggctccgagccaggggctattgc

SEQ ID NO: 13595 - DNA, 16 bp, Homo sapiens
cggctccgagcccgag

SEQ ID NO: 13596 - DNA, 16 bp, Homo sapiens
cggctccgcgggggaa

SEQ ID NO: 13597 - DNA, 17 bp, Homo sapiens
cggctccgcgggggaaa

SEQ ID NO: 13598 - DNA, 22 bp, Homo sapiens
cggctcctgttcctggcggtgc

SEQ ID NO: 13599 - DNA, 18 bp, Homo sapiens
cggctcgagactcccggg

SEQ ID NO: 13600 - DNA, 20 bp, Homo sapiens
cggctcgccgtctgccgaca

SEQ ID NO: 13601 - DNA, 19 bp, Homo sapiens
cggctcgcgcacggctccg

SEQ ID NO: 13602 - DNA, 22 bp, Homo sapiens
cggctcgcggagtgcctgcgag

SEQ ID NO: 13603 - DNA, 21 bp, Homo sapiens
cggctcggatggccgcgagct

SEQ ID NO: 13604 - DNA, 18 bp, Homo sapiens
cggctcggcgcgggggcc

SEQ ID NO: 13605 - DNA, 19 bp, Homo sapiens
cggctcggctgtaaggagg

SEQ ID NO: 13606 - DNA, 21 bp, Homo sapiens
cggctcgtcgctgggggcttg

SEQ ID NO: 13607 - DNA, 23 bp, Homo sapiens
cggctctggcctcctgacccaga

SEQ ID NO: 13608 - DNA, 18 bp, Homo sapiens
cggctctttccctgcagt

SEQ ID NO: 13609 - DNA, 18 bp, Homo sapiens
cggctgaccagttggcga

SEQ ID NO: 13610 - DNA, 23 bp, Homo sapiens
cggctgacgcggaagcggctctg

SEQ ID NO: 13611 - DNA, 18 bp, Homo sapiens
cggctgacggagccgggc

SEQ ID NO: 13612 - DNA, 21 bp, Homo sapiens
cggctgactgggaaatgtcag

SEQ ID NO: 13613 - DNA, 18 bp, Homo sapiens
cggctgagacaggtaacc

SEQ ID NO: 13614 - DNA, 20 bp, Homo sapiens
cggctgaggagggcggagag

SEQ ID NO: 13615 - DNA, 23 bp, Homo sapiens
cggctgaggagtggggtgatgat

SEQ ID NO: 13616 - DNA, 18 bp, Homo sapiens
cggctgatggcggatcag

SEQ ID NO: 13617 - DNA, 17 bp, Homo sapiens
cggctgattcgagggct

SEQ ID NO: 13618 - DNA, 21 bp, Homo sapiens
tcggcggggaggcccccgcgc

SEQ ID NO: 13619 - DNA, 21 bp, Homo sapiens
tcggcggtcccgcgggtctgt

SEQ ID NO: 13620 - DNA, 21 bp, Homo sapiens
tcggcggtccgggcccactga

SEQ ID NO: 13621 - DNA, 17 bp, Homo sapiens
tcggcgtcgcgtcgctc

SEQ ID NO: 13622 - DNA, 17 bp, Homo sapiens
tcggctacagcttcggc

SEQ ID NO: 13623 - DNA, 23 bp, Homo sapiens
tcggcttcagacacgccttagcg

SEQ ID NO: 13624 - DNA, 19 bp, Homo sapiens
tcggctttgggcgcgagtg

SEQ ID NO: 13625 - DNA, 18 bp, Homo sapiens
tcgggaacagctggagaa

SEQ ID NO: 13626 - DNA, 19 bp, Homo sapiens
tcgggaaccttacagagtg

SEQ ID NO: 13627 - DNA, 17 bp, Homo sapiens
tcgggaccgactgacgg

SEQ ID NO: 13628 - DNA, 18 bp, Homo sapiens
tcgggaccgactgacggc

SEQ ID NO: 13629 - DNA, 19 bp, Homo sapiens
tcgggagactgcacaggcc

SEQ ID NO: 13630 - DNA, 18 bp, Homo sapiens
tcgggagccgcggcttat

SEQ ID NO: 13631 - DNA, 22 bp, Homo sapiens
tcgggagccgtggaggtacgaa

SEQ ID NO: 13632 - DNA, 19 bp, Homo sapiens
tcgggagcgggattgtttc

SEQ ID NO: 13633 - DNA, 14 bp, Homo sapiens
tcgggaggcccgac

SEQ ID NO: 13634 - DNA, 18 bp, Homo sapiens
tcgggaggtggtggagtg

SEQ ID NO: 13635 - DNA, 19 bp, Homo sapiens
tcgggagttggagggctga

SEQ ID NO: 13636 - DNA, 17 bp, Homo sapiens
tcgggatatcgggtggc

SEQ ID NO: 13637 - DNA, 18 bp, Homo sapiens
tcgggatcgccgaggggg

SEQ ID NO: 13638 - DNA, 23 bp, Homo sapiens
tcgggccaggacccagggggccg

SEQ ID NO: 13639 - DNA, 21 bp, Homo sapiens
tcgggccgcggcggccgctgg

SEQ ID NO: 13640 - DNA, 17 bp, Homo sapiens
tcgggccggcgctccct

SEQ ID NO: 13641 - DNA, 17 bp, Homo sapiens
tcgggccgggcgacgag

SEQ ID NO: 13642 - DNA, 18 bp, Homo sapiens
tcgggccggggcgttggg

SEQ ID NO: 13643 - DNA, 18 bp, Homo sapiens
tcgggcctggcgggctcc

SEQ ID NO: 13644 - DNA, 18 bp, Homo sapiens
tcgggcggacccggaacc

SEQ ID NO: 13645 - DNA, 20 bp, Homo sapiens
tcgggcggagagaggagctg

SEQ ID NO: 13646 - DNA, 19 bp, Homo sapiens
tcgggcgggcgggaggtgc

SEQ ID NO: 13647 - DNA, 19 bp, Homo sapiens
tcgggcgtcgtcctggcgt

SEQ ID NO: 13648 - DNA, 21 bp, Homo sapiens
tcgggcgtcgtcctggcgtcc

SEQ ID NO: 13649 - DNA, 16 bp, Homo sapiens
tcgggctccgtcagtt

SEQ ID NO: 13650 - DNA, 19 bp, Homo sapiens
tcgggctccgtcagtttcc

SEQ ID NO: 13651 - DNA, 18 bp, Homo sapiens
tcgggctcgtccgccatg

SEQ ID NO: 13652 - DNA, 20 bp, Homo sapiens
tcgggctgacagtgagagga

SEQ ID NO: 13653 - DNA, 18 bp, Homo sapiens
tcgggctgcaggagaaga

SEQ ID NO: 13654 - DNA, 20 bp, Homo sapiens
tcgggctgcggggctccggc

SEQ ID NO: 13655 - DNA, 19 bp, Homo sapiens
tcgggctgtcatcgtggct

SEQ ID NO: 13656 - DNA, 18 bp, Homo sapiens
tcggggagccgcccccgc

SEQ ID NO: 13657 - DNA, 18 bp, Homo sapiens
tcggggaggtgggtgggg

SEQ ID NO: 13658 - DNA, 17 bp, Homo sapiens
tcggggcaaggctcagc

SEQ ID NO: 13659 - DNA, 18 bp, Homo sapiens
tcggggccaagatggcga

SEQ ID NO: 13660 - DNA, 15 bp, Homo sapiens
tcggggccgctcggc

SEQ ID NO: 13661 - DNA, 18 bp, Homo sapiens
tcggggcgcgcccggaaa

SEQ ID NO: 13662 - DNA, 16 bp, Homo sapiens
tcggggcggcagctga

SEQ ID NO: 13663 - DNA, 19 bp, Homo sapiens
tcggggcttggaggggaaa

SEQ ID NO: 13664 - DNA, 20 bp, Homo sapiens
tcgggggcggctgtggcgga

SEQ ID NO: 13665 - DNA, 18 bp, Homo sapiens
tcggggtcccagcgccgg

SEQ ID NO: 13666 - DNA, 18 bp, Homo sapiens
tcgggtagaaagggtcct

SEQ ID NO: 13667 - DNA, 17 bp, Homo sapiens
tcgggtcccggcagcgg

SEQ ID NO: 13668 - DNA, 20 bp, Homo sapiens
tcgggtcttctgacgtgccg

SEQ ID NO: 13669 - DNA, 18 bp, Homo sapiens
tcgggtgagcgaagatgg

SEQ ID NO: 13670 - DNA, 18 bp, Homo sapiens
tcgggtgagtgcgggctg

SEQ ID NO: 13671 - DNA, 16 bp, Homo sapiens
tcgggtggagcagaga

SEQ ID NO: 13672 - DNA, 20 bp, Homo sapiens
tcgggtggagctgagccgga

SEQ ID NO: 13673 - DNA, 17 bp, Homo sapiens
tcgggtggcggctcggg

SEQ ID NO: 13674 - DNA, 18 bp, Homo sapiens
tcgggtggcggctcggga

SEQ ID NO: 13675 - DNA, 18 bp, Homo sapiens
cggctgcaatatggcgga

SEQ ID NO: 13676 - DNA, 18 bp, Homo sapiens
cggctgcactgcggatga

SEQ ID NO: 13677 - DNA, 17 bp, Homo sapiens
cggctgcagcagggcga

SEQ ID NO: 13678 - DNA, 18 bp, Homo sapiens
cggctgcagcagggcgag

SEQ ID NO: 13679 - DNA, 20 bp, Homo sapiens
cggctgcagcggtgggaagg

SEQ ID NO: 13680 - DNA, 19 bp, Homo sapiens
cggctgcaggaggcgggcg

SEQ ID NO: 13681 - DNA, 18 bp, Homo sapiens
cggctgcaggcggatgga

SEQ ID NO: 13682 - DNA, 18 bp, Homo sapiens
cggctgcatttacggggt

SEQ ID NO: 13683 - DNA, 19 bp, Homo sapiens
cggctgcccgcccggactg

SEQ ID NO: 13684 - DNA, 23 bp, Homo sapiens
cggctgccgcgcagacccagctg

SEQ ID NO: 13685 - DNA, 20 bp, Homo sapiens
cggctgcctgtggctcttgg

SEQ ID NO: 13686 - DNA, 19 bp, Homo sapiens
cggctgcgaacatgcctga

SEQ ID NO: 13687 - DNA, 20 bp, Homo sapiens
cggctgcgagaaaggacgcg

SEQ ID NO: 13688 - DNA, 19 bp, Homo sapiens
cggctgcgagcaggttcgg

SEQ ID NO: 13689 - DNA, 18 bp, Homo sapiens
cggctgcgcacagctcgg

SEQ ID NO: 13690 - DNA, 18 bp, Homo sapiens
cggctgcgcccttcagta

SEQ ID NO: 13691 - DNA, 21 bp, Homo sapiens
cggctgcgcgggacggctctg

SEQ ID NO: 13692 - DNA, 18 bp, Homo sapiens
cggctgcggcagtaggga

SEQ ID NO: 13693 - DNA, 21 bp, Homo sapiens
cggctgcggcagtagggacag

SEQ ID NO: 13694 - DNA, 18 bp, Homo sapiens
cggctgcggctgagtgac

SEQ ID NO: 13695 - DNA, 21 bp, Homo sapiens
cggctgcggggccaacgcggc

SEQ ID NO: 13696 - DNA, 18 bp, Homo sapiens
cggctgctccagggaggc

SEQ ID NO: 13697 - DNA, 21 bp, Homo sapiens
cggctgctgattgtgttctag

SEQ ID NO: 13698 - DNA, 19 bp, Homo sapiens
cggctgctgggcagctgat

SEQ ID NO: 13699 - DNA, 16 bp, Homo sapiens
cggctgcttgcgcccc

SEQ ID NO: 13700 - DNA, 19 bp, Homo sapiens
cggctggaccaggagaccg

SEQ ID NO: 13701 - DNA, 20 bp, Homo sapiens
cggctggagcgcagcgccga

SEQ ID NO: 13702 - DNA, 18 bp, Homo sapiens
cggctggaggaggaagcc

SEQ ID NO: 13703 - DNA, 16 bp, Homo sapiens
cggctggaggccggtc

SEQ ID NO: 13704 - DNA, 17 bp, Homo sapiens
cggctggagggcgtttc

SEQ ID NO: 13705 - DNA, 18 bp, Homo sapiens
cggctgggaaatggcggc

SEQ ID NO: 13706 - DNA, 18 bp, Homo sapiens
cggctgggagaagcggag

SEQ ID NO: 13707 - DNA, 20 bp, Homo sapiens
cggctgggagaagcggagtg

SEQ ID NO: 13708 - DNA, 18 bp, Homo sapiens
cggctgggagcgggaaga

SEQ ID NO: 13709 - DNA, 19 bp, Homo sapiens
cggctgggagcgggaagac

SEQ ID NO: 13710 - DNA, 21 bp, Homo sapiens
cggctgggagcgggaagactc

SEQ ID NO: 13711 - DNA, 16 bp, Homo sapiens
cggctgggagtaggcg

SEQ ID NO: 13712 - DNA, 19 bp, Homo sapiens
cggctgggatggtgagggc

SEQ ID NO: 13713 - DNA, 21 bp, Homo sapiens
cggctgggcctgagcgtcgag

SEQ ID NO: 13714 - DNA, 16 bp, Homo sapiens
cggctgggcgaccggc

SEQ ID NO: 13715 - DNA, 18 bp, Homo sapiens
cggctgggctcggtcggg

SEQ ID NO: 13716 - DNA, 19 bp, Homo sapiens
cggctggggaagatggcgg

SEQ ID NO: 13717 - DNA, 23 bp, Homo sapiens
cggctggggccggctagggcgcc

SEQ ID NO: 13718 - DNA, 18 bp, Homo sapiens
cggctgggtaagtgagac

SEQ ID NO: 13719 - DNA, 17 bp, Homo sapiens
cggctgtagcggggctg

SEQ ID NO: 13720 - DNA, 22 bp, Homo sapiens
cggctgtcactgcgcccgagca

SEQ ID NO: 13721 - DNA, 18 bp, Homo sapiens
cggctgtccaatcgagtc

SEQ ID NO: 13722 - DNA, 18 bp, Homo sapiens
cggctgtggggagggcga

SEQ ID NO: 13723 - DNA, 17 bp, Homo sapiens
cggctgttccgccgagg

SEQ ID NO: 13724 - DNA, 17 bp, Homo sapiens
cggcttaatcggaacca

SEQ ID NO: 13725 - DNA, 22 bp, Homo sapiens
cggcttagagggaggggctttt

SEQ ID NO: 13726 - DNA, 22 bp, Homo sapiens
cggcttcagacacgccttagcg

SEQ ID NO: 13727 - DNA, 18 bp, Homo sapiens
cggcttccaggtgggcgc

SEQ ID NO: 13728 - DNA, 18 bp, Homo sapiens
cggcttcctgggtctggc

SEQ ID NO: 13729 - DNA, 16 bp, Homo sapiens
cggcttcgagcaccct

SEQ ID NO: 13730 - DNA, 19 bp, Homo sapiens
cggcttcgagcatccctag

SEQ ID NO: 13731 - DNA, 18 bp, Homo sapiens
cggcttctccatagaggg

SEQ ID NO: 13732 - DNA, 18 bp, Homo sapiens
tcgggtggggtgctgcgt

SEQ ID NO: 13733 - DNA, 22 bp, Homo sapiens
tcgggttaggaggagctaggct

SEQ ID NO: 13734 - DNA, 18 bp, Homo sapiens
tcggtaccctgggcgcgg

SEQ ID NO: 13735 - DNA, 18 bp, Homo sapiens
tcggtagagggtgagttt

SEQ ID NO: 13736 - DNA, 18 bp, Homo sapiens
tcggtcagacggtgatag

SEQ ID NO: 13737 - DNA, 22 bp, Homo sapiens
tcggtccggtcgcgtccgacac

SEQ ID NO: 13738 - DNA, 18 bp, Homo sapiens
tcggtcggaaatggtgag

SEQ ID NO: 13739 - DNA, 16 bp, Homo sapiens
tcggtcggaccaacgg

SEQ ID NO: 13740 - DNA, 18 bp, Homo sapiens
tcggtgacgggaagtgag

SEQ ID NO: 13741 - DNA, 18 bp, Homo sapiens
tcggtgactgtggagggc

SEQ ID NO: 13742 - DNA, 19 bp, Homo sapiens
tcggtgagaggcggaggag

SEQ ID NO: 13743 - DNA, 21 bp, Homo sapiens
tcggtgagtagccgccgcctc

SEQ ID NO: 13744 - DNA, 17 bp, Homo sapiens
tcggtgctgccggggga

SEQ ID NO: 13745 - DNA, 19 bp, Homo sapiens
tcggtgggctccaggcgtc

SEQ ID NO: 13746 - DNA, 19 bp, Homo sapiens
tcggtgtctgcagcaccct

SEQ ID NO: 13747 - DNA, 16 bp, Homo sapiens
tcggttcaaggcagcg

SEQ ID NO: 13748 - DNA, 18 bp, Homo sapiens
tcggttgcacggagaccg

SEQ ID NO: 13749 - DNA, 18 bp, Homo sapiens
tcggttgcgcgtgtgcca

SEQ ID NO: 13750 - DNA, 19 bp, Homo sapiens
tcggttggcgcagcagcca

SEQ ID NO: 13751 - DNA, 23 bp, Homo sapiens
tcggttggtggcgcctttgtcct

SEQ ID NO: 13752 - DNA, 18 bp, Homo sapiens
tcggtttggccctgactg

SEQ ID NO: 13753 - DNA, 21 bp, Homo sapiens
tcgtattcgttgttctcggcg

SEQ ID NO: 13754 - DNA, 18 bp, Homo sapiens
tcgtcgctgctggcactt

SEQ ID NO: 13755 - DNA, 19 bp, Homo sapiens
tcgtcttcgcccgccatgg

SEQ ID NO: 13756 - DNA, 21 bp, Homo sapiens
tcgtcttcgcccgccatggcc

SEQ ID NO: 13757 - DNA, 16 bp, Homo sapiens
tcgtgctatgaccgga

SEQ ID NO: 13758 - DNA, 18 bp, Homo sapiens
tcgtggctgcagcgctga

SEQ ID NO: 13759 - DNA, 16 bp, Homo sapiens
tcgtggttgtcccgcc

SEQ ID NO: 13760 - DNA, 19 bp, Homo sapiens
tcgtggttgtcccgccatg

SEQ ID NO: 13761 - DNA, 18 bp, Homo sapiens
tcgtgtggaatcgcgggt

SEQ ID NO: 13762 - DNA, 19 bp, Homo sapiens
tcgttgacggcgcgggctc

SEQ ID NO: 13763 - DNA, 18 bp, Homo sapiens
tcgttgtctttctaggtc

SEQ ID NO: 13764 - DNA, 20 bp, Homo sapiens
tcgttgttctcggcgggctg

SEQ ID NO: 13765 - DNA, 16 bp, Homo sapiens
tcgtttacagttcggc

SEQ ID NO: 13766 - DNA, 18 bp, Homo sapiens
tcgtttgctgagagcggg

SEQ ID NO: 13767 - DNA, 17 bp, Homo sapiens
tcgtttttcctttagtc

SEQ ID NO: 13768 - DNA, 24 bp, Homo sapiens
tctaaattgacgttttggtgggct

SEQ ID NO: 13769 - DNA, 14 bp, Homo sapiens
tctaacgttggccc

SEQ ID NO: 13770 - DNA, 23 bp, Homo sapiens
tctacagccatgtattcggctcc

SEQ ID NO: 13771 - DNA, 18 bp, Homo sapiens
tctacatgccagtctcca

SEQ ID NO: 13772 - DNA, 18 bp, Homo sapiens
tctaccgcagtcgtttga

SEQ ID NO: 13773 - DNA, 19 bp, Homo sapiens
tctaccggcgggatttgat

SEQ ID NO: 13774 - DNA, 20 bp, Homo sapiens
tctaccttgcgagccgtctt

SEQ ID NO: 13775 - DNA, 17 bp, Homo sapiens
tctacttcagaagcgga

SEQ ID NO: 13776 - DNA, 18 bp, Homo sapiens
tctaggtagctggcacca

SEQ ID NO: 13777 - DNA, 17 bp, Homo sapiens
tctagtacccgagctca

SEQ ID NO: 13778 - DNA, 19 bp, Homo sapiens
tctagtgaacagcggagcc

SEQ ID NO: 13779 - DNA, 18 bp, Homo sapiens
tctagttcgggaaaagtg

SEQ ID NO: 13780 - DNA, 18 bp, Homo sapiens
tctatcgacgagtctggt

SEQ ID NO: 13781 - DNA, 19 bp, Homo sapiens
tctatgcaaatcagcccgg

SEQ ID NO: 13782 - DNA, 18 bp, Homo sapiens
tctcaactatggcccgga

SEQ ID NO: 13783 - DNA, 17 bp, Homo sapiens
tctcacactttcaggct

SEQ ID NO: 13784 - DNA, 18 bp, Homo sapiens
tctcacactttcaggctc

SEQ ID NO: 13785 - DNA, 16 bp, Homo sapiens
tctcacagcgactgcg

SEQ ID NO: 13786 - DNA, 18 bp, Homo sapiens
tctcacggagacggacca

SEQ ID NO: 13787 - DNA, 18 bp, Homo sapiens
tctcacttccgcttcctt

SEQ ID NO: 13788 - DNA, 19 bp, Homo sapiens
tctcacttccgcttccttc

SEQ ID NO: 13789 - DNA, 19 bp, Homo sapiens
cggcttctgatgggtctct

SEQ ID NO: 13790 - DNA, 18 bp, Homo sapiens
cggcttctgggacgccga

SEQ ID NO: 13791 - DNA, 20 bp, Homo sapiens
cggcttgaggtaacagcgcg

SEQ ID NO: 13792 - DNA, 18 bp, Homo sapiens
cggcttggctggcgagcc

SEQ ID NO: 13793 - DNA, 18 bp, Homo sapiens
cggcttgtgcagcaatgg

SEQ ID NO: 13794 - DNA, 18 bp, Homo sapiens
cggctttcgggcggtcgg

SEQ ID NO: 13795 - DNA, 19 bp, Homo sapiens
cggctttcggtgactagac

SEQ ID NO: 13796 - DNA, 20 bp, Homo sapiens
cggctttgaccgagaggctg

SEQ ID NO: 13797 - DNA, 20 bp, Homo sapiens
cgggaaaagtgtgaggggct

SEQ ID NO: 13798 - DNA, 16 bp, Homo sapiens
cgggaaagcagcggaa

SEQ ID NO: 13799 - DNA, 17 bp, Homo sapiens
cgggaaaggcagacagg

SEQ ID NO: 13800 - DNA, 18 bp, Homo sapiens
cgggaaagtcgaaaacta

SEQ ID NO: 13801 - DNA, 16 bp, Homo sapiens
cgggaaagttcgcggc

SEQ ID NO: 13802 - DNA, 17 bp, Homo sapiens
cgggaaatggctttaat

SEQ ID NO: 13803 - DNA, 18 bp, Homo sapiens
cgggaacacgaggccaag

SEQ ID NO: 13804 - DNA, 17 bp, Homo sapiens
cgggaaccgcaccaagc

SEQ ID NO: 13805 - DNA, 18 bp, Homo sapiens
cgggaactagtcggacct

SEQ ID NO: 13806 - DNA, 17 bp, Homo sapiens
cgggaagcctgacaggg

SEQ ID NO: 13807 - DNA, 20 bp, Homo sapiens
cgggaagcggggctgtctgg

SEQ ID NO: 13808 - DNA, 23 bp, Homo sapiens
cgggaagggaaccgacatgctcc

SEQ ID NO: 13809 - DNA, 16 bp, Homo sapiens
cgggaagggggtcggt

SEQ ID NO: 13810 - DNA, 16 bp, Homo sapiens
cgggaagggtactcca

SEQ ID NO: 13811 - DNA, 18 bp, Homo sapiens
cgggaagtggaacctggc

SEQ ID NO: 13812 - DNA, 18 bp, Homo sapiens
cgggaagttggcttagct

SEQ ID NO: 13813 - DNA, 18 bp, Homo sapiens
cgggacagcaccgctggt

SEQ ID NO: 13814 - DNA, 18 bp, Homo sapiens
cgggacaggaggatccgg

SEQ ID NO: 13815 - DNA, 16 bp, Homo sapiens
cgggacagggcgaagc

SEQ ID NO: 13816 - DNA, 18 bp, Homo sapiens
cgggacagggcgaagcgg

SEQ ID NO: 13817 - DNA, 19 bp, Homo sapiens
cgggacagggcgaagcggc

SEQ ID NO: 13818 - DNA, 18 bp, Homo sapiens
cgggacccggagcccgag

SEQ ID NO: 13819 - DNA, 18 bp, Homo sapiens
cgggaccgacggtgtgtg

SEQ ID NO: 13820 - DNA, 18 bp, Homo sapiens
cgggaccgactgacggcc

SEQ ID NO: 13821 - DNA, 18 bp, Homo sapiens
cgggaccgagcgagcgac

SEQ ID NO: 13822 - DNA, 21 bp, Homo sapiens
cgggaccgagcgagcgaccga

SEQ ID NO: 13823 - DNA, 17 bp, Homo sapiens
cgggaccggagaggaag

SEQ ID NO: 13824 - DNA, 20 bp, Homo sapiens
cgggaccggccgcgatggga

SEQ ID NO: 13825 - DNA, 19 bp, Homo sapiens
cgggacgagaccggggctg

SEQ ID NO: 13826 - DNA, 18 bp, Homo sapiens
cgggacgagcggccgcct

SEQ ID NO: 13827 - DNA, 18 bp, Homo sapiens
cgggacggaacgttcacg

SEQ ID NO: 13828 - DNA, 19 bp, Homo sapiens
cgggacgggcggctgcggt

SEQ ID NO: 13829 - DNA, 18 bp, Homo sapiens
cgggacgtgcgcatcctg

SEQ ID NO: 13830 - DNA, 19 bp, Homo sapiens
cgggacgtgcggcccagcg

SEQ ID NO: 13831 - DNA, 18 bp, Homo sapiens
cgggactaggagcgcggc

SEQ ID NO: 13832 - DNA, 21 bp, Homo sapiens
cgggagaacgataatgcaaag

SEQ ID NO: 13833 - DNA, 18 bp, Homo sapiens
cgggagaagatggacaag

SEQ ID NO: 13834 - DNA, 19 bp, Homo sapiens
cgggagaaggaaacgcggg

SEQ ID NO: 13835 - DNA, 18 bp, Homo sapiens
cgggagagagctaggccg

SEQ ID NO: 13836 - DNA, 18 bp, Homo sapiens
cgggagagggaatgagtg

SEQ ID NO: 13837 - DNA, 17 bp, Homo sapiens
cgggagagggagaacac

SEQ ID NO: 13838 - DNA, 19 bp, Homo sapiens
cgggagaggggcgggcgcc

SEQ ID NO: 13839 - DNA, 24 bp, Homo sapiens
cgggagattcaccaggactgggct

SEQ ID NO: 13840 - DNA, 18 bp, Homo sapiens
cgggagcagagcgaaccg

SEQ ID NO: 13841 - DNA, 22 bp, Homo sapiens
cgggagcagccgtcgagccaca

SEQ ID NO: 13842 - DNA, 18 bp, Homo sapiens
cgggagccgagcccgagc

SEQ ID NO: 13843 - DNA, 16 bp, Homo sapiens
cgggagcgcggagcag

SEQ ID NO: 13844 - DNA, 17 bp, Homo sapiens
cgggagcggacttacct

SEQ ID NO: 13845 - DNA, 20 bp, Homo sapiens
cgggagcggacttaccttac

SEQ ID NO: 13846 - DNA, 17 bp, Homo sapiens
tctcagtgaccgggtgg

SEQ ID NO: 13847 - DNA, 19 bp, Homo sapiens
tctcattcatagagccagc

SEQ ID NO: 13848 - DNA, 18 bp, Homo sapiens
tctccaaaggagtgcttg

SEQ ID NO: 13849 - DNA, 17 bp, Homo sapiens
tctccatagagggcgga

SEQ ID NO: 13850 - DNA, 18 bp, Homo sapiens
tctccatccagctgtgcg

SEQ ID NO: 13851 - DNA, 16 bp, Homo sapiens
tctcccgaacgccagc

SEQ ID NO: 13852 - DNA, 18 bp, Homo sapiens
tctcccggtgtaggcgct

SEQ ID NO: 13853 - DNA, 18 bp, Homo sapiens
tctccgagtctgggttgg

SEQ ID NO: 13854 - DNA, 21 bp, Homo sapiens
tctccgccacctccaccgcgg

SEQ ID NO: 13855 - DNA, 19 bp, Homo sapiens
tctccgcccgtgctcagaa

SEQ ID NO: 13856 - DNA, 21 bp, Homo sapiens
tctccggacttcgagccatgg

SEQ ID NO: 13857 - DNA, 18 bp, Homo sapiens
tctccgtagaaacgctgg

SEQ ID NO: 13858 - DNA, 18 bp, Homo sapiens
tctcctaaccgacgcgcg

SEQ ID NO: 13859 - DNA, 18 bp, Homo sapiens
tctcctcagggttggaga

SEQ ID NO: 13860 - DNA, 17 bp, Homo sapiens
tctcctcccggcctcac

SEQ ID NO: 13861 - DNA, 20 bp, Homo sapiens
tctcctttcgttgcctgatc

SEQ ID NO: 13862 - DNA, 18 bp, Homo sapiens
tctcgactccatcttcgc

SEQ ID NO: 13863 - DNA, 22 bp, Homo sapiens
tctcgagctaggtttcgtttcc

SEQ ID NO: 13864 - DNA, 16 bp, Homo sapiens
tctcgccatgtttttc

SEQ ID NO: 13865 - DNA, 17 bp, Homo sapiens
tctcgcccaactcccag

SEQ ID NO: 13866 - DNA, 16 bp, Homo sapiens
tctcgccgtgagacag

SEQ ID NO: 13867 - DNA, 18 bp, Homo sapiens
tctcgcgagagaggacgg

SEQ ID NO: 13868 - DNA, 19 bp, Homo sapiens
tctcgggggcggcccgggc

SEQ ID NO: 13869 - DNA, 20 bp, Homo sapiens
tctcgggtcttctgacgtgc

SEQ ID NO: 13870 - DNA, 19 bp, Homo sapiens
tctcggtctgtggcagcag

SEQ ID NO: 13871 - DNA, 20 bp, Homo sapiens
tctcgttggggactaaggcg

SEQ ID NO: 13872 - DNA, 17 bp, Homo sapiens
tctctagactgggacgg

SEQ ID NO: 13873 - DNA, 19 bp, Homo sapiens
tctctcctcagggttggag

SEQ ID NO: 13874 - DNA, 17 bp, Homo sapiens
tctctcgccaggcgtcc

SEQ ID NO: 13875 - DNA, 18 bp, Homo sapiens
tctctcggctcctcgcgg

SEQ ID NO: 13876 - DNA, 19 bp, Homo sapiens
tctctcggctcctcgcggc

SEQ ID NO: 13877 - DNA, 20 bp, Homo sapiens
tctctcggctcctcgcggct

SEQ ID NO: 13878 - DNA, 21 bp, Homo sapiens
tctctcggctcctcgcggctc

SEQ ID NO: 13879 - DNA, 22 bp, Homo sapiens
tctctcggctcctcgcggctcg

SEQ ID NO: 13880 - DNA, 23 bp, Homo sapiens
tctctcggctcctcgcggctcgc

SEQ ID NO: 13881 - DNA, 22 bp, Homo sapiens
tctctcggggctggctcgggag

SEQ ID NO: 13882 - DNA, 18 bp, Homo sapiens
tctctcgggttgttactc

SEQ ID NO: 13883 - DNA, 18 bp, Homo sapiens
tctctctttcgctcaggc

SEQ ID NO: 13884 - DNA, 21 bp, Homo sapiens
tctctggactggaccagaagt

SEQ ID NO: 13885 - DNA, 18 bp, Homo sapiens
tctctggcagtaggcacc

SEQ ID NO: 13886 - DNA, 18 bp, Homo sapiens
tctctggctccgggctgc

SEQ ID NO: 13887 - DNA, 18 bp, Homo sapiens
tctctggtaaagtctgag

SEQ ID NO: 13888 - DNA, 20 bp, Homo sapiens
tctctggtaaagtctgagca

SEQ ID NO: 13889 - DNA, 20 bp, Homo sapiens
tctcttacttcttttcttgg

SEQ ID NO: 13890 - DNA, 20 bp, Homo sapiens
tctcttcccactcgggtttg

SEQ ID NO: 13891 - DNA, 20 bp, Homo sapiens
tctcttcgcaaggttcacct

SEQ ID NO: 13892 - DNA, 17 bp, Homo sapiens
tctcttcttgccgccgg

SEQ ID NO: 13893 - DNA, 18 bp, Homo sapiens
tctctttcactgcaaggc

SEQ ID NO: 13894 - DNA, 18 bp, Homo sapiens
tctctttcccatcttgca

SEQ ID NO: 13895 - DNA, 17 bp, Homo sapiens
tctgaaagactgaccga

SEQ ID NO: 13896 - DNA, 21 bp, Homo sapiens
tctgaaagggagtgttcgggt

SEQ ID NO: 13897 - DNA, 18 bp, Homo sapiens
tctgaacgctgccatggc

SEQ ID NO: 13898 - DNA, 16 bp, Homo sapiens
tctgaagcgctgggag

SEQ ID NO: 13899 - DNA, 17 bp, Homo sapiens
tctgaattgagaagccg

SEQ ID NO: 13900 - DNA, 20 bp, Homo sapiens
tctgacttaggccacaggtc

SEQ ID NO: 13901 - DNA, 18 bp, Homo sapiens
tctgagaagccaagactg

SEQ ID NO: 13902 - DNA, 21 bp, Homo sapiens
tctgagaagccaagactgagc

SEQ ID NO: 13903 - DNA, 17 bp, Homo sapiens
cgggagcggcaacagag

SEQ ID NO: 13904 - DNA, 18 bp, Homo sapiens
cgggagcgggattgtttc

SEQ ID NO: 13905 - DNA, 20 bp, Homo sapiens
cgggagcgggcgggagcagc

SEQ ID NO: 13906 - DNA, 18 bp, Homo sapiens
cgggagctcggctcgctg

SEQ ID NO: 13907 - DNA, 18 bp, Homo sapiens
cgggagctgcgaggagcc

SEQ ID NO: 13908 - DNA, 18 bp, Homo sapiens
cgggagctggcgccatgg

SEQ ID NO: 13909 - DNA, 20 bp, Homo sapiens
cgggagctgggaacccgcag

SEQ ID NO: 13910 - DNA, 18 bp, Homo sapiens
cgggaggacgcgaggccc

SEQ ID NO: 13911 - DNA, 18 bp, Homo sapiens
cgggaggaggcggacacg

SEQ ID NO: 13912 - DNA, 19 bp, Homo sapiens
cgggaggcggcagggctgg

SEQ ID NO: 13913 - DNA, 18 bp, Homo sapiens
cgggaggctcgcggcgcc

SEQ ID NO: 13914 - DNA, 19 bp, Homo sapiens
cgggaggctgagcagtact

SEQ ID NO: 13915 - DNA, 16 bp, Homo sapiens
cgggagggcctaagtc

SEQ ID NO: 13916 - DNA, 16 bp, Homo sapiens
cgggagggcggacgga

SEQ ID NO: 13917 - DNA, 17 bp, Homo sapiens
cgggagggcggggagcg

SEQ ID NO: 13918 - DNA, 18 bp, Homo sapiens
cgggaggggccgaacctg

SEQ ID NO: 13919 - DNA, 17 bp, Homo sapiens
cgggaggggcggggagg

SEQ ID NO: 13920 - DNA, 18 bp, Homo sapiens
cgggagtagctgcctggg

SEQ ID NO: 13921 - DNA, 16 bp, Homo sapiens
cgggagtcgccgggcc

SEQ ID NO: 13922 - DNA, 19 bp, Homo sapiens
cgggagtcggtgaggcggc

SEQ ID NO: 13923 - DNA, 16 bp, Homo sapiens
cgggagtgcgcacatt

SEQ ID NO: 13924 - DNA, 18 bp, Homo sapiens
cgggagttagggtcaggc

SEQ ID NO: 13925 - DNA, 18 bp, Homo sapiens
cgggagttcaaggaggtg

SEQ ID NO: 13926 - DNA, 23 bp, Homo sapiens
cgggagttctgagtgcgacggcg

SEQ ID NO: 13927 - DNA, 16 bp, Homo sapiens
cgggatacacagaacc

SEQ ID NO: 13928 - DNA, 17 bp, Homo sapiens
cgggatacacagaacct

SEQ ID NO: 13929 - DNA, 18 bp, Homo sapiens
cgggatatcgggtggcgg

SEQ ID NO: 13930 - DNA, 19 bp, Homo sapiens
cgggatatcgggtggcggc

SEQ ID NO: 13931 - DNA, 18 bp, Homo sapiens
cgggatcctgtgtagcgg

SEQ ID NO: 13932 - DNA, 19 bp, Homo sapiens
cgggatcctgtgtagcggc

SEQ ID NO: 13933 - DNA, 19 bp, Homo sapiens
cgggatctggatgaccgcg

SEQ ID NO: 13934 - DNA, 18 bp, Homo sapiens
cgggattagttggtttcg

SEQ ID NO: 13935 - DNA, 18 bp, Homo sapiens
cgggcactgacgggcact

SEQ ID NO: 13936 - DNA, 19 bp, Homo sapiens
cgggcagagcgctagggct

SEQ ID NO: 13937 - DNA, 18 bp, Homo sapiens
cgggcagagctcggccgc

SEQ ID NO: 13938 - DNA, 17 bp, Homo sapiens
cgggcagcaaaggagga

SEQ ID NO: 13939 - DNA, 18 bp, Homo sapiens
cgggcagcagcgacagga

SEQ ID NO: 13940 - DNA, 22 bp, Homo sapiens
cgggcaggcgccgggaggccga

SEQ ID NO: 13941 - DNA, 18 bp, Homo sapiens
cgggcaggcggacgccgg

SEQ ID NO: 13942 - DNA, 17 bp, Homo sapiens
cgggcaggtacgcggcg

SEQ ID NO: 13943 - DNA, 19 bp, Homo sapiens
cgggcaggtacgcggcgcg

SEQ ID NO: 13944 - DNA, 18 bp, Homo sapiens
cgggcaggtgcgtccgcg

SEQ ID NO: 13945 - DNA, 17 bp, Homo sapiens
cgggcatccccacactc

SEQ ID NO: 13946 - DNA, 17 bp, Homo sapiens
cgggcatgataacacac

SEQ ID NO: 13947 - DNA, 17 bp, Homo sapiens
cgggccagcagaggggg

SEQ ID NO: 13948 - DNA, 18 bp, Homo sapiens
cgggccaggggctgccgt

SEQ ID NO: 13949 - DNA, 22 bp, Homo sapiens
cgggccatggcggcgaacctga

SEQ ID NO: 13950 - DNA, 18 bp, Homo sapiens
cgggccatggtggggcag

SEQ ID NO: 13951 - DNA, 16 bp, Homo sapiens
cgggcccgagacggac

SEQ ID NO: 13952 - DNA, 15 bp, Homo sapiens
cgggcccgtgtcccc

SEQ ID NO: 13953 - DNA, 16 bp, Homo sapiens
cgggccgactggtgtt

SEQ ID NO: 13954 - DNA, 20 bp, Homo sapiens
cgggccgactgtgtagtccg

SEQ ID NO: 13955 - DNA, 18 bp, Homo sapiens
cgggccgcggcggagcca

SEQ ID NO: 13956 - DNA, 21 bp, Homo sapiens
cgggccggcgcgggagggctg

SEQ ID NO: 13957 - DNA, 18 bp, Homo sapiens
cgggccgggaggctgagc

SEQ ID NO: 13958 - DNA, 19 bp, Homo sapiens
cgggccgggaggctgagca

SEQ ID NO: 13959 - DNA, 18 bp, Homo sapiens
cgggccgggcagtctggg

SEQ ID NO: 13960 - DNA, 17 bp, Homo sapiens
tctgagcagccattgaa

SEQ ID NO: 13961 - DNA, 18 bp, Homo sapiens
tctgagcgcccggcggaa

SEQ ID NO: 13962 - DNA, 19 bp, Homo sapiens
tctgaggcgactggtgacg

SEQ ID NO: 13963 - DNA, 18 bp, Homo sapiens
tctgaggggacaggagga

SEQ ID NO: 13964 - DNA, 20 bp, Homo sapiens
tctgcaagctggtcaaaaag

SEQ ID NO: 13965 - DNA, 21 bp, Homo sapiens
tctgcaatatccccacaaggg

SEQ ID NO: 13966 - DNA, 18 bp, Homo sapiens
tctgcagagcgtgggttt

SEQ ID NO: 13967 - DNA, 22 bp, Homo sapiens
tctgcagaggcctccgcagtca

SEQ ID NO: 13968 - DNA, 19 bp, Homo sapiens
tctgcagagtctacttcag

SEQ ID NO: 13969 - DNA, 17 bp, Homo sapiens
tctgcaggcactcggta

SEQ ID NO: 13970 - DNA, 18 bp, Homo sapiens
tctgcagtgcaggtggct

SEQ ID NO: 13971 - DNA, 20 bp, Homo sapiens
tctgcataagaaggggaacg

SEQ ID NO: 13972 - DNA, 18 bp, Homo sapiens
tctgcccggccacagagc

SEQ ID NO: 13973 - DNA, 16 bp, Homo sapiens
tctgccggtggggact

SEQ ID NO: 13974 - DNA, 21 bp, Homo sapiens
tctgccggtggggactcttgc

SEQ ID NO: 13975 - DNA, 18 bp, Homo sapiens
tctgcctacatctgacgt

SEQ ID NO: 13976 - DNA, 21 bp, Homo sapiens
tctgcctctgtccaggtcctt

SEQ ID NO: 13977 - DNA, 18 bp, Homo sapiens
tctgcgatcttcccagca

SEQ ID NO: 13978 - DNA, 18 bp, Homo sapiens
tctgcgcagccgtggctg

SEQ ID NO: 13979 - DNA, 20 bp, Homo sapiens
tctgcgcctgcgccccggca

SEQ ID NO: 13980 - DNA, 23 bp, Homo sapiens
tctgctaacgtagtccctcagtg

SEQ ID NO: 13981 - DNA, 18 bp, Homo sapiens
tctgctgcccagtcgcgc

SEQ ID NO: 13982 - DNA, 20 bp, Homo sapiens
tctgctgcccagtcgcgccg

SEQ ID NO: 13983 - DNA, 18 bp, Homo sapiens
tctgctgctgtttgtcta

SEQ ID NO: 13984 - DNA, 19 bp, Homo sapiens
tctgctggatgtgaaatgg

SEQ ID NO: 13985 - DNA, 23 bp, Homo sapiens
tctggaaagttctgatcagtgcg

SEQ ID NO: 13986 - DNA, 18 bp, Homo sapiens
tctggactgttctcaggc

SEQ ID NO: 13987 - DNA, 23 bp, Homo sapiens
tctggaggagcagttgtctgatg

SEQ ID NO: 13988 - DNA, 18 bp, Homo sapiens
tctggatcgagtagtgta

SEQ ID NO: 13989 - DNA, 20 bp, Homo sapiens
tctggatcgagtagtgtaag

SEQ ID NO: 13990 - DNA, 18 bp, Homo sapiens
tctggcaagatggctgct

SEQ ID NO: 13991 - DNA, 18 bp, Homo sapiens
tctggcagaactcgggtg

SEQ ID NO: 13992 - DNA, 17 bp, Homo sapiens
tctggcagcggcggcga

SEQ ID NO: 13993 - DNA, 14 bp, Homo sapiens
tctggcgagcgccg

SEQ ID NO: 13994 - DNA, 16 bp, Homo sapiens
tctgggaaaaggcttg

SEQ ID NO: 13995 - DNA, 18 bp, Homo sapiens
tctgggaagggagaatgg

SEQ ID NO: 13996 - DNA, 20 bp, Homo sapiens
tctgggcgctccgggaaggg

SEQ ID NO: 13997 - DNA, 20 bp, Homo sapiens
tctgggctcggacctaggtc

SEQ ID NO: 13998 - DNA, 19 bp, Homo sapiens
tctggggagcgcgagcccg

SEQ ID NO: 13999 - DNA, 17 bp, Homo sapiens
tctggggcgcagaaccg

SEQ ID NO: 14000 - DNA, 22 bp, Homo sapiens
tctggggctgccgcggctccga

SEQ ID NO: 14001 - DNA, 18 bp, Homo sapiens
tctgggtcgggacagcac

SEQ ID NO: 14002 - DNA, 20 bp, Homo sapiens
tctgggtgcccagaaaggcg

SEQ ID NO: 14003 - DNA, 17 bp, Homo sapiens
tctgggtggcgcggtcg

SEQ ID NO: 14004 - DNA, 20 bp, Homo sapiens
tctggtagaggcaaaggtgg

SEQ ID NO: 14005 - DNA, 20 bp, Homo sapiens
tctggtcgtggcaaacaagg

SEQ ID NO: 14006 - DNA, 18 bp, Homo sapiens
tctggtctcggccgcaga

SEQ ID NO: 14007 - DNA, 19 bp, Homo sapiens
tctggtctcggccgcagaa

SEQ ID NO: 14008 - DNA, 18 bp, Homo sapiens
tctggtgagtggctcggc

SEQ ID NO: 14009 - DNA, 18 bp, Homo sapiens
tctggtggctccgcggat

SEQ ID NO: 14010 - DNA, 18 bp, Homo sapiens
tctggtgtccacgtgatc

SEQ ID NO: 14011 - DNA, 18 bp, Homo sapiens
tctggtgttatgtcctcg

SEQ ID NO: 14012 - DNA, 18 bp, Homo sapiens
tctgtatgatcttcggag

SEQ ID NO: 14013 - DNA, 18 bp, Homo sapiens
tctgtccaatcagacccc

SEQ ID NO: 14014 - DNA, 17 bp, Homo sapiens
tctgtcccagggaaagg

SEQ ID NO: 14015 - DNA, 16 bp, Homo sapiens
tctgtcgagcagcgga

SEQ ID NO: 14016 - DNA, 17 bp, Homo sapiens
tctgtcgcggctgaatc

SEQ ID NO: 14017 - DNA, 17 bp, Homo sapiens
cgggcctcaggctcctt

SEQ ID NO: 14018 - DNA, 17 bp, Homo sapiens
cgggcctgatcagaaga

SEQ ID NO: 14019 - DNA, 19 bp, Homo sapiens
cgggcctgcggctgcccag

SEQ ID NO: 14020 - DNA, 21 bp, Homo sapiens
cgggcctgggcctgggctccg

SEQ ID NO: 14021 - DNA, 17 bp, Homo sapiens
cgggcgaagcgggcgag

SEQ ID NO: 14022 - DNA, 20 bp, Homo sapiens
cgggcgaagcgggcgagcgg

SEQ ID NO: 14023 - DNA, 18 bp, Homo sapiens
cgggcgagaagatggcgg

SEQ ID NO: 14024 - DNA, 16 bp, Homo sapiens
cgggcgagcggttgtg

SEQ ID NO: 14025 - DNA, 18 bp, Homo sapiens
cgggcgagctcagcagcc

SEQ ID NO: 14026 - DNA, 23 bp, Homo sapiens
cgggcgagctcagcagcccggag

SEQ ID NO: 14027 - DNA, 20 bp, Homo sapiens
cgggcgagggccgggcagga

SEQ ID NO: 14028 - DNA, 18 bp, Homo sapiens
cgggcgataatggcggcg

SEQ ID NO: 14029 - DNA, 20 bp, Homo sapiens
cgggcgatgaggggccggcg

SEQ ID NO: 14030 - DNA, 18 bp, Homo sapiens
cgggcgcagcaccctagg

SEQ ID NO: 14031 - DNA, 18 bp, Homo sapiens
cgggcgcagggggccgag

SEQ ID NO: 14032 - DNA, 17 bp, Homo sapiens
cgggcgccacggaggcc

SEQ ID NO: 14033 - DNA, 17 bp, Homo sapiens
cgggcgcccggccggct

SEQ ID NO: 14034 - DNA, 20 bp, Homo sapiens
cgggcgccgagtgtcgggcg

SEQ ID NO: 14035 - DNA, 21 bp, Homo sapiens
cgggcgccgagtgtcgggcgc

SEQ ID NO: 14036 - DNA, 20 bp, Homo sapiens
cgggcgccgccgactgaagt

SEQ ID NO: 14037 - DNA, 19 bp, Homo sapiens
cgggcgccggggcggctgc

SEQ ID NO: 14038 - DNA, 18 bp, Homo sapiens
cgggcgcgagaagagggg

SEQ ID NO: 14039 - DNA, 20 bp, Homo sapiens
cgggcgcggcaggaggacga

SEQ ID NO: 14040 - DNA, 19 bp, Homo sapiens
cgggcgcggcggcgcgcgg

SEQ ID NO: 14041 - DNA, 18 bp, Homo sapiens
cgggcgcgggcagagcgc

SEQ ID NO: 14042 - DNA, 16 bp, Homo sapiens
cgggcgctcaggttgg

SEQ ID NO: 14043 - DNA, 18 bp, Homo sapiens
cgggcgctcaggttggtc

SEQ ID NO: 14044 - DNA, 18 bp, Homo sapiens
cgggcgctcgggaggtat

SEQ ID NO: 14045 - DNA, 18 bp, Homo sapiens
cgggcgctgagtggtttt

SEQ ID NO: 14046 - DNA, 20 bp, Homo sapiens
cgggcggacagactgcggga

SEQ ID NO: 14047 - DNA, 18 bp, Homo sapiens
cgggcggaggaggaagtg

SEQ ID NO: 14048 - DNA, 18 bp, Homo sapiens
cgggcggccggccggaca

SEQ ID NO: 14049 - DNA, 21 bp, Homo sapiens
cgggcgggagagagaggccgc

SEQ ID NO: 14050 - DNA, 18 bp, Homo sapiens
cgggcgggcgggaggtgc

SEQ ID NO: 14051 - DNA, 18 bp, Homo sapiens
cgggcggtatagagcggg

SEQ ID NO: 14052 - DNA, 20 bp, Homo sapiens
cgggcggtcctgccgagctg

SEQ ID NO: 14053 - DNA, 17 bp, Homo sapiens
cgggcgtaagcggactg

SEQ ID NO: 14054 - DNA, 18 bp, Homo sapiens
cgggcgtcggaggccctg

SEQ ID NO: 14055 - DNA, 18 bp, Homo sapiens
cgggcgtggacgagccgg

SEQ ID NO: 14056 - DNA, 22 bp, Homo sapiens
cgggctacctcagttctcgggc

SEQ ID NO: 14057 - DNA, 18 bp, Homo sapiens
cgggctagagaagagagg

SEQ ID NO: 14058 - DNA, 18 bp, Homo sapiens
cgggctccgtcagtttcc

SEQ ID NO: 14059 - DNA, 23 bp, Homo sapiens
cgggctccgtcagtttcctcggc

SEQ ID NO: 14060 - DNA, 21 bp, Homo sapiens
cgggctcgcgcgggagagcag

SEQ ID NO: 14061 - DNA, 16 bp, Homo sapiens
cgggctctgaagcggt

SEQ ID NO: 14062 - DNA, 20 bp, Homo sapiens
cgggctctgcagtagtcgcc

SEQ ID NO: 14063 - DNA, 19 bp, Homo sapiens
cgggctgacagtgagagga

SEQ ID NO: 14064 - DNA, 20 bp, Homo sapiens
cgggctgaggcggcccagcg

SEQ ID NO: 14065 - DNA, 17 bp, Homo sapiens
cgggctgcaggagaaga

SEQ ID NO: 14066 - DNA, 16 bp, Homo sapiens
cgggctgccagcggtg

SEQ ID NO: 14067 - DNA, 18 bp, Homo sapiens
cgggctgccagcggtgag

SEQ ID NO: 14068 - DNA, 20 bp, Homo sapiens
cgggctgccagcggtgagtg

SEQ ID NO: 14069 - DNA, 18 bp, Homo sapiens
cgggctgccgctaacgga

SEQ ID NO: 14070 - DNA, 18 bp, Homo sapiens
cgggctggaactggcagg

SEQ ID NO: 14071 - DNA, 19 bp, Homo sapiens
cgggctggaactggcaggc

SEQ ID NO: 14072 - DNA, 21 bp, Homo sapiens
cgggctggaactggcaggcac

SEQ ID NO: 14073 - DNA, 22 bp, Homo sapiens
cgggctggaactggcaggcacc

SEQ ID NO: 14074 - DNA, 20 bp, Homo sapiens
tctgtctgggggccgttgcg

SEQ ID NO: 14075 - DNA, 21 bp, Homo sapiens
tctgtgcgtacgccctgcggc

SEQ ID NO: 14076 - DNA, 18 bp, Homo sapiens
tctgtggaaagtgggcgg

SEQ ID NO: 14077 - DNA, 17 bp, Homo sapiens
tctgtggaccttatgga

SEQ ID NO: 14078 - DNA, 18 bp, Homo sapiens
tctgtggggtcgagactg

SEQ ID NO: 14079 - DNA, 17 bp, Homo sapiens
tctgtgggtacccggag

SEQ ID NO: 14080 - DNA, 16 bp, Homo sapiens
tctgtggtggccgcgg

SEQ ID NO: 14081 - DNA, 20 bp, Homo sapiens
tctgttgctctgaaggtgtg

SEQ ID NO: 14082 - DNA, 18 bp, Homo sapiens
tctgttggatttgacgcg

SEQ ID NO: 14083 - DNA, 18 bp, Homo sapiens
tctgttgtgtcttgttgc

SEQ ID NO: 14084 - DNA, 18 bp, Homo sapiens
tcttacagactgccaaat

SEQ ID NO: 14085 - DNA, 19 bp, Homo sapiens
tcttacttcttttcttggc

SEQ ID NO: 14086 - DNA, 18 bp, Homo sapiens
tcttagaagagagcccac

SEQ ID NO: 14087 - DNA, 24 bp, Homo sapiens
tcttagatggcgggagtaagagga

SEQ ID NO: 14088 - DNA, 18 bp, Homo sapiens
tcttcacccggaaatggt

SEQ ID NO: 14089 - DNA, 17 bp, Homo sapiens
tcttcaggtaccgctgc

SEQ ID NO: 14090 - DNA, 18 bp, Homo sapiens
tcttccaggtagggccta

SEQ ID NO: 14091 - DNA, 17 bp, Homo sapiens
tcttccccgctgagagg

SEQ ID NO: 14092 - DNA, 18 bp, Homo sapiens
tcttcccgtctgaggtgg

SEQ ID NO: 14093 - DNA, 24 bp, Homo sapiens
tcttccgtacaggttcctgctgtt

SEQ ID NO: 14094 - DNA, 18 bp, Homo sapiens
tcttcctgcagtgtttct

SEQ ID NO: 14095 - DNA, 18 bp, Homo sapiens
tcttcctgcgatgagctc

SEQ ID NO: 14096 - DNA, 16 bp, Homo sapiens
tcttcctggagacacc

SEQ ID NO: 14097 - DNA, 22 bp, Homo sapiens
tcttcgcccgccatggccgaga

SEQ ID NO: 14098 - DNA, 18 bp, Homo sapiens
tcttcggagcctgctgca

SEQ ID NO: 14099 - DNA, 18 bp, Homo sapiens
tcttctggaagccataat

SEQ ID NO: 14100 - DNA, 17 bp, Homo sapiens
tcttgaaggacggaatt

SEQ ID NO: 14101 - DNA, 18 bp, Homo sapiens
tcttgagtgtaaagtcca

SEQ ID NO: 14102 - DNA, 21 bp, Homo sapiens
tcttgcattactattgtgcgg

SEQ ID NO: 14103 - DNA, 18 bp, Homo sapiens
tcttggaccagcccgagg

SEQ ID NO: 14104 - DNA, 23 bp, Homo sapiens
tcttgggaagtcatgtctggacg

SEQ ID NO: 14105 - DNA, 17 bp, Homo sapiens
tcttgtttgtttgagtg

SEQ ID NO: 14106 - DNA, 19 bp, Homo sapiens
tcttgtttgtttgagtgaa

SEQ ID NO: 14107 - DNA, 20 bp, Homo sapiens
tctttaggcgtgcgaggagg

SEQ ID NO: 14108 - DNA, 20 bp, Homo sapiens
tctttaggttgtggacgaag

SEQ ID NO: 14109 - DNA, 17 bp, Homo sapiens
tctttcccatcttgcaa

SEQ ID NO: 14110 - DNA, 18 bp, Homo sapiens
tctttccccttcagtgtc

SEQ ID NO: 14111 - DNA, 20 bp, Homo sapiens
tctttccgtggagctgtcgc

SEQ ID NO: 14112 - DNA, 17 bp, Homo sapiens
tctttcgctcaggcccg

SEQ ID NO: 14113 - DNA, 18 bp, Homo sapiens
tctttcgctcaggcccgt

SEQ ID NO: 14114 - DNA, 19 bp, Homo sapiens
tctttgctctaacagacag

SEQ ID NO: 14115 - DNA, 21 bp, Homo sapiens
tctttggagtaagaatggcct

SEQ ID NO: 14116 - DNA, 18 bp, Homo sapiens
tctttgtaaggagaccac

SEQ ID NO: 14117 - DNA, 19 bp, Homo sapiens
tcttttcccaaggtggatg

SEQ ID NO: 14118 - DNA, 18 bp, Homo sapiens
tcttttctgggaagacaa

SEQ ID NO: 14119 - DNA, 21 bp, Homo sapiens
tctttttccggctggaaccat

SEQ ID NO: 14120 - DNA, 21 bp, Homo sapiens
tctttttcgcaacgggtttgc

SEQ ID NO: 14121 - DNA, 18 bp, Homo sapiens
tgaaaatccgaagtgccg

SEQ ID NO: 14122 - DNA, 19 bp, Homo sapiens
tgaaaatccgaagtgccgc

SEQ ID NO: 14123 - DNA, 20 bp, Homo sapiens
tgaaaccctgggcggcggca

SEQ ID NO: 14124 - DNA, 19 bp, Homo sapiens
tgaaagaagtttgctgacg

SEQ ID NO: 14125 - DNA, 19 bp, Homo sapiens
tgaaagactcggcttctgc

SEQ ID NO: 14126 - DNA, 16 bp, Homo sapiens
tgaaatgctttcggta

SEQ ID NO: 14127 - DNA, 16 bp, Homo sapiens
tgaaattggcatcgag

SEQ ID NO: 14128 - DNA, 20 bp, Homo sapiens
tgaacatgtcgcgcctgaag

SEQ ID NO: 14129 - DNA, 18 bp, Homo sapiens
tgaactttaggagagctg

SEQ ID NO: 14130 - DNA, 18 bp, Homo sapiens
tgaagacctggcggagcc

SEQ ID NO: 14131 - DNA, 18 bp, Homo sapiens
cgggctggcggagatgga

SEQ ID NO: 14132 - DNA, 20 bp, Homo sapiens
cgggctgggcttcagttccc

SEQ ID NO: 14133 - DNA, 18 bp, Homo sapiens
cgggctggggcggtcgct

SEQ ID NO: 14134 - DNA, 17 bp, Homo sapiens
cgggctgtccggagggg

SEQ ID NO: 14135 - DNA, 20 bp, Homo sapiens
cgggctgtccggaggggtcg

SEQ ID NO: 14136 - DNA, 22 bp, Homo sapiens
cgggctgtgggaataagatggc

SEQ ID NO: 14137 - DNA, 18 bp, Homo sapiens
cgggctgtggtccccgcg

SEQ ID NO: 14138 - DNA, 18 bp, Homo sapiens
cgggcttcgggtcggtgc

SEQ ID NO: 14139 - DNA, 18 bp, Homo sapiens
cgggctttccgttctcca

SEQ ID NO: 14140 - DNA, 20 bp, Homo sapiens
cggggaagtggccgaggagg

SEQ ID NO: 14141 - DNA, 18 bp, Homo sapiens
cggggaatcgcgtaatgg

SEQ ID NO: 14142 - DNA, 19 bp, Homo sapiens
cggggaatgtgaagagctc

SEQ ID NO: 14143 - DNA, 18 bp, Homo sapiens
cggggacagcgcgagccg

SEQ ID NO: 14144 - DNA, 18 bp, Homo sapiens
cggggacagttagggcgg

SEQ ID NO: 14145 - DNA, 19 bp, Homo sapiens
cggggacatgtgcgtgctg

SEQ ID NO: 14146 - DNA, 18 bp, Homo sapiens
cggggaccatggagccgg

SEQ ID NO: 14147 - DNA, 18 bp, Homo sapiens
cggggacgcgcgcccgcc

SEQ ID NO: 14148 - DNA, 18 bp, Homo sapiens
cggggacgggggcgagag

SEQ ID NO: 14149 - DNA, 18 bp, Homo sapiens
cggggactggggcctcgt

SEQ ID NO: 14150 - DNA, 17 bp, Homo sapiens
cggggagagggtgagtg

SEQ ID NO: 14151 - DNA, 17 bp, Homo sapiens
cggggagccggcggtta

SEQ ID NO: 14152 - DNA, 18 bp, Homo sapiens
cggggagcgcatcccggc

SEQ ID NO: 14153 - DNA, 18 bp, Homo sapiens
cggggagggacgagaggg

SEQ ID NO: 14154 - DNA, 17 bp, Homo sapiens
cggggatgctgcggctc

SEQ ID NO: 14155 - DNA, 18 bp, Homo sapiens
cggggatggtcacacgcg

SEQ ID NO: 14156 - DNA, 18 bp, Homo sapiens
cggggcactgtaaatggc

SEQ ID NO: 14157 - DNA, 17 bp, Homo sapiens
cggggcagagcgcaggg

SEQ ID NO: 14158 - DNA, 18 bp, Homo sapiens
cggggcagcggagcaggg

SEQ ID NO: 14159 - DNA, 18 bp, Homo sapiens
cggggcaggagggcagcc

SEQ ID NO: 14160 - DNA, 20 bp, Homo sapiens
cggggcaggggtgcggtctt

SEQ ID NO: 14161 - DNA, 21 bp, Homo sapiens
cggggccacggcacctgggca

SEQ ID NO: 14162 - DNA, 20 bp, Homo sapiens
cggggccatgcaggagagcc

SEQ ID NO: 14163 - DNA, 18 bp, Homo sapiens
cggggcgaggcagctggc

SEQ ID NO: 14164 - DNA, 20 bp, Homo sapiens
cggggcgcgccccggccgcc

SEQ ID NO: 14165 - DNA, 19 bp, Homo sapiens
cggggcgctctcgggctgc

SEQ ID NO: 14166 - DNA, 21 bp, Homo sapiens
cggggcggctatggcggccac

SEQ ID NO: 14167 - DNA, 18 bp, Homo sapiens
cggggcgggaacgcggag

SEQ ID NO: 14168 - DNA, 18 bp, Homo sapiens
cggggcggggcggctccg

SEQ ID NO: 14169 - DNA, 20 bp, Homo sapiens
cggggcggggcgggagagaa

SEQ ID NO: 14170 - DNA, 16 bp, Homo sapiens
cggggcgggggagagt

SEQ ID NO: 14171 - DNA, 18 bp, Homo sapiens
cggggcggtgactgcggc

SEQ ID NO: 14172 - DNA, 17 bp, Homo sapiens
cggggctaaaggagctt

SEQ ID NO: 14173 - DNA, 17 bp, Homo sapiens
cggggctcgggaccggc

SEQ ID NO: 14174 - DNA, 18 bp, Homo sapiens
cggggctgaagggagagg

SEQ ID NO: 14175 - DNA, 21 bp, Homo sapiens
cggggctgagggaaggaggcg

SEQ ID NO: 14176 - DNA, 18 bp, Homo sapiens
cggggctgccctggggtc

SEQ ID NO: 14177 - DNA, 22 bp, Homo sapiens
cggggctgcgagctagggcggg

SEQ ID NO: 14178 - DNA, 18 bp, Homo sapiens
cggggctgcgtaggggag

SEQ ID NO: 14179 - DNA, 20 bp, Homo sapiens
cggggctgctggcggctctg

SEQ ID NO: 14180 - DNA, 22 bp, Homo sapiens
cggggctgctggcggctctgca

SEQ ID NO: 14181 - DNA, 18 bp, Homo sapiens
cggggctgtagccgggcg

SEQ ID NO: 14182 - DNA, 18 bp, Homo sapiens
cgggggaaaggagacgct

SEQ ID NO: 14183 - DNA, 17 bp, Homo sapiens
cgggggaactagctgga

SEQ ID NO: 14184 - DNA, 18 bp, Homo sapiens
cgggggaactagctggag

SEQ ID NO: 14185 - DNA, 20 bp, Homo sapiens
cgggggaactagctggaggg

SEQ ID NO: 14186 - DNA, 18 bp, Homo sapiens
cgggggaaggagtttccg

SEQ ID NO: 14187 - DNA, 19 bp, Homo sapiens
cgggggaaggggaggggac

SEQ ID NO: 14188 - DNA, 18 bp, Homo sapiens
tgaagcagatcagccggg

SEQ ID NO: 14189 - DNA, 19 bp, Homo sapiens
tgaagccagaagctgtggg

SEQ ID NO: 14190 - DNA, 16 bp, Homo sapiens
tgaagcctaactgtcc

SEQ ID NO: 14191 - DNA, 19 bp, Homo sapiens
tgaagcgcctgtgctctgc

SEQ ID NO: 14192 - DNA, 22 bp, Homo sapiens
tgaagcgcctgtgctctgccga

SEQ ID NO: 14193 - DNA, 23 bp, Homo sapiens
tgaagcgcctgtgctctgccgag

SEQ ID NO: 14194 - DNA, 17 bp, Homo sapiens
tgaagtgcgtgtttgtt

SEQ ID NO: 14195 - DNA, 16 bp, Homo sapiens
tgaatagggtcaacga

SEQ ID NO: 14196 - DNA, 18 bp, Homo sapiens
tgaatcgcggtgcgacga

SEQ ID NO: 14197 - DNA, 22 bp, Homo sapiens
tgaatttcttacagactgccaa

SEQ ID NO: 14198 - DNA, 18 bp, Homo sapiens
tgacaaaaacaaacggtg

SEQ ID NO: 14199 - DNA, 19 bp, Homo sapiens
tgacacaaccagctgactc

SEQ ID NO: 14200 - DNA, 17 bp, Homo sapiens
tgacacggcggacgccg

SEQ ID NO: 14201 - DNA, 18 bp, Homo sapiens
tgacagcgaaagaacgat

SEQ ID NO: 14202 - DNA, 18 bp, Homo sapiens
tgacaggaggcggcagcg

SEQ ID NO: 14203 - DNA, 19 bp, Homo sapiens
tgacagtgagtgcgtgaga

SEQ ID NO: 14204 - DNA, 16 bp, Homo sapiens
tgaccacagacatgtc

SEQ ID NO: 14205 - DNA, 20 bp, Homo sapiens
tgaccatggaagcgaatggg

SEQ ID NO: 14206 - DNA, 23 bp, Homo sapiens
tgacccatccacatcgggaagcc

SEQ ID NO: 14207 - DNA, 20 bp, Homo sapiens
tgaccccaggctgcggccgc

SEQ ID NO: 14208 - DNA, 18 bp, Homo sapiens
tgaccccgcagtgggcgc

SEQ ID NO: 14209 - DNA, 18 bp, Homo sapiens
tgaccctcggctgctgca

SEQ ID NO: 14210 - DNA, 16 bp, Homo sapiens
tgaccgaggggcggac

SEQ ID NO: 14211 - DNA, 20 bp, Homo sapiens
tgaccggaggcggcggcggc

SEQ ID NO: 14212 - DNA, 19 bp, Homo sapiens
tgaccggctgcctggctga

SEQ ID NO: 14213 - DNA, 19 bp, Homo sapiens
tgacgacacacaaggtttc

SEQ ID NO: 14214 - DNA, 19 bp, Homo sapiens
tgacgatgacgttgccaga

SEQ ID NO: 14215 - DNA, 18 bp, Homo sapiens
tgacgccatattggggcc

SEQ ID NO: 14216 - DNA, 15 bp, Homo sapiens
tgacgccggccacgc

SEQ ID NO: 14217 - DNA, 23 bp, Homo sapiens
tgacgccgtgtttcctctttcgg

SEQ ID NO: 14218 - DNA, 18 bp, Homo sapiens
tgacgctccgcattgcag

SEQ ID NO: 14219 - DNA, 20 bp, Homo sapiens
tgacggccgcagcgggtcgc

SEQ ID NO: 14220 - DNA, 18 bp, Homo sapiens
tgacggtcgggccgcctc

SEQ ID NO: 14221 - DNA, 17 bp, Homo sapiens
tgacgtcacggcgccca

SEQ ID NO: 14222 - DNA, 18 bp, Homo sapiens
tgacgtcaggccgtagga

SEQ ID NO: 14223 - DNA, 19 bp, Homo sapiens
tgacgtgtctttcaggaag

SEQ ID NO: 14224 - DNA, 20 bp, Homo sapiens
tgacgtgtctttcaggaaga

SEQ ID NO: 14225 - DNA, 18 bp, Homo sapiens
tgactcgccctgcgccct

SEQ ID NO: 14226 - DNA, 21 bp, Homo sapiens
tgactgagcggagcccggtga

SEQ ID NO: 14227 - DNA, 19 bp, Homo sapiens
tgactgccacactttgcaa

SEQ ID NO: 14228 - DNA, 17 bp, Homo sapiens
tgactggacggtgagtg

SEQ ID NO: 14229 - DNA, 18 bp, Homo sapiens
tgactggaggctggcgga

SEQ ID NO: 14230 - DNA, 19 bp, Homo sapiens
tgactgggaaatgtcagcc

SEQ ID NO: 14231 - DNA, 15 bp, Homo sapiens
tgactgttcggccgc

SEQ ID NO: 14232 - DNA, 24 bp, Homo sapiens
tgacttcccgactgggagccttag

SEQ ID NO: 14233 - DNA, 18 bp, Homo sapiens
tgagaagtatccgcgacg

SEQ ID NO: 14234 - DNA, 22 bp, Homo sapiens
tgagaccgaggaccgaaatccc

SEQ ID NO: 14235 - DNA, 18 bp, Homo sapiens
tgagacctcggctccggg

SEQ ID NO: 14236 - DNA, 18 bp, Homo sapiens
tgagagagttggttggtg

SEQ ID NO: 14237 - DNA, 15 bp, Homo sapiens
tgagaggcccgcgaa

SEQ ID NO: 14238 - DNA, 16 bp, Homo sapiens
tgagaggcccgcgaac

SEQ ID NO: 14239 - DNA, 18 bp, Homo sapiens
tgagaggcggaggagcgg

SEQ ID NO: 14240 - DNA, 20 bp, Homo sapiens
tgagcagcgagatccaggga

SEQ ID NO: 14241 - DNA, 19 bp, Homo sapiens
tgagcccggccgggcggac

SEQ ID NO: 14242 - DNA, 17 bp, Homo sapiens
tgagccctgcggaacct

SEQ ID NO: 14243 - DNA, 18 bp, Homo sapiens
tgagccgagccgagccga

SEQ ID NO: 14244 - DNA, 16 bp, Homo sapiens
tgagcgcccggcggaa

SEQ ID NO: 14245 - DNA, 17 bp, Homo sapiens
cgggggagcgaggcacg

SEQ ID NO: 14246 - DNA, 19 bp, Homo sapiens
cgggggaggagggcggaga

SEQ ID NO: 14247 - DNA, 18 bp, Homo sapiens
cgggggcgtcacagacag

SEQ ID NO: 14248 - DNA, 18 bp, Homo sapiens
cgggggctctagtgaaca

SEQ ID NO: 14249 - DNA, 19 bp, Homo sapiens
cgggggctctagtgaacag

SEQ ID NO: 14250 - DNA, 20 bp, Homo sapiens
cgggggctgacatgtcgtcc

SEQ ID NO: 14251 - DNA, 20 bp, Homo sapiens
cgggggctgatggaagtgca

SEQ ID NO: 14252 - DNA, 18 bp, Homo sapiens
cgggggcttctgggaaaa

SEQ ID NO: 14253 - DNA, 18 bp, Homo sapiens
cggggggcgagtaagcca

SEQ ID NO: 14254 - DNA, 18 bp, Homo sapiens
cgggggttaggagacgga

SEQ ID NO: 14255 - DNA, 20 bp, Homo sapiens
cgggggttgtcagtccgatc

SEQ ID NO: 14256 - DNA, 16 bp, Homo sapiens
cggggtaggcgatggc

SEQ ID NO: 14257 - DNA, 18 bp, Homo sapiens
cggggtaggcgatggctg

SEQ ID NO: 14258 - DNA, 19 bp, Homo sapiens
cggggtccggacagccgcg

SEQ ID NO: 14259 - DNA, 19 bp, Homo sapiens
cggggtgatcatggacgct

SEQ ID NO: 14260 - DNA, 22 bp, Homo sapiens
cggggtgcggagggagtccctg

SEQ ID NO: 14261 - DNA, 18 bp, Homo sapiens
cggggtggacaagtggcg

SEQ ID NO: 14262 - DNA, 20 bp, Homo sapiens
cggggtggacaagtggcgtg

SEQ ID NO: 14263 - DNA, 18 bp, Homo sapiens
cggggtggaggtgaggag

SEQ ID NO: 14264 - DNA, 21 bp, Homo sapiens
cggggtgggtgaggtcgggcc

SEQ ID NO: 14265 - DNA, 20 bp, Homo sapiens
cggggtgttgggtgctagtc

SEQ ID NO: 14266 - DNA, 18 bp, Homo sapiens
cggggttagccgcgcgtc

SEQ ID NO: 14267 - DNA, 18 bp, Homo sapiens
cggggttggatgccaggg

SEQ ID NO: 14268 - DNA, 21 bp, Homo sapiens
cgggtagctgcgcgcgggtgg

SEQ ID NO: 14269 - DNA, 18 bp, Homo sapiens
cgggtagggcgcccgtgt

SEQ ID NO: 14270 - DNA, 19 bp, Homo sapiens
cgggtaggtgacggcttgg

SEQ ID NO: 14271 - DNA, 17 bp, Homo sapiens
cgggtcaggcggcccct

SEQ ID NO: 14272 - DNA, 17 bp, Homo sapiens
cgggtccgacacaggct

SEQ ID NO: 14273 - DNA, 19 bp, Homo sapiens
cgggtcctgtgaaggcgag

SEQ ID NO: 14274 - DNA, 18 bp, Homo sapiens
cgggtcgcggacgctcgc

SEQ ID NO: 14275 - DNA, 18 bp, Homo sapiens
cgggtcggactggggctg

SEQ ID NO: 14276 - DNA, 19 bp, Homo sapiens
cgggtcggagccatggcgg

SEQ ID NO: 14277 - DNA, 18 bp, Homo sapiens
cgggtcggggaggaggtt

SEQ ID NO: 14278 - DNA, 18 bp, Homo sapiens
cgggtcgtggcagccgga

SEQ ID NO: 14279 - DNA, 16 bp, Homo sapiens
cgggtctgacaggagc

SEQ ID NO: 14280 - DNA, 18 bp, Homo sapiens
cgggtctgacaggagcag

SEQ ID NO: 14281 - DNA, 18 bp, Homo sapiens
cgggtctgcggcttaggg

SEQ ID NO: 14282 - DNA, 18 bp, Homo sapiens
cgggtcttctgacgtgcc

SEQ ID NO: 14283 - DNA, 16 bp, Homo sapiens
cgggtgagacaaggcc

SEQ ID NO: 14284 - DNA, 18 bp, Homo sapiens
cgggtgagaggttcccgc

SEQ ID NO: 14285 - DNA, 20 bp, Homo sapiens
cgggtgagcagacggatcgg

SEQ ID NO: 14286 - DNA, 18 bp, Homo sapiens
cgggtgaggcctggagaa

SEQ ID NO: 14287 - DNA, 18 bp, Homo sapiens
cgggtgagtgagagagtt

SEQ ID NO: 14288 - DNA, 21 bp, Homo sapiens
cgggtgagtgagagagttggt

SEQ ID NO: 14289 - DNA, 18 bp, Homo sapiens
cgggtgagtggaggctgg

SEQ ID NO: 14290 - DNA, 18 bp, Homo sapiens
cgggtgatagttggagcg

SEQ ID NO: 14291 - DNA, 17 bp, Homo sapiens
cgggtggaaacaaactc

SEQ ID NO: 14292 - DNA, 24 bp, Homo sapiens
cgggtggacgcggctcctctctcg

SEQ ID NO: 14293 - DNA, 18 bp, Homo sapiens
cgggtggaggccacacgc

SEQ ID NO: 14294 - DNA, 18 bp, Homo sapiens
cgggtggcagccgcagcc

SEQ ID NO: 14295 - DNA, 18 bp, Homo sapiens
cgggtggcccaggcacgc

SEQ ID NO: 14296 - DNA, 18 bp, Homo sapiens
cgggtggcgggtagagtt

SEQ ID NO: 14297 - DNA, 22 bp, Homo sapiens
cgggtggctggcggttccgtta

SEQ ID NO: 14298 - DNA, 18 bp, Homo sapiens
cgggtggcttacagacgc

SEQ ID NO: 14299 - DNA, 21 bp, Homo sapiens
cgggtgggtggtggaggctgc

SEQ ID NO: 14300 - DNA, 15 bp, Homo sapiens
cgggtgtaagacgcc

SEQ ID NO: 14301 - DNA, 21 bp, Homo sapiens
cgggtgttcgccgctggagcc

SEQ ID NO: 14302 - DNA, 18 bp, Homo sapiens
tgagcgctccgacttcca

SEQ ID NO: 14303 - DNA, 18 bp, Homo sapiens
tgagcggacggcaaagaa

SEQ ID NO: 14304 - DNA, 19 bp, Homo sapiens
tgagcggcggcagctgcga

SEQ ID NO: 14305 - DNA, 19 bp, Homo sapiens
tgagcggctgggcgaccgg

SEQ ID NO: 14306 - DNA, 19 bp, Homo sapiens
tgagcgggcggagcgcgag

SEQ ID NO: 14307 - DNA, 18 bp, Homo sapiens
tgagctcgctgagacttc

SEQ ID NO: 14308 - DNA, 18 bp, Homo sapiens
tgaggaaagccgtgcgtt

SEQ ID NO: 14309 - DNA, 22 bp, Homo sapiens
tgaggaagtagggggctgggaa

SEQ ID NO: 14310 - DNA, 18 bp, Homo sapiens
tgaggactcagcgaaggg

SEQ ID NO: 14311 - DNA, 21 bp, Homo sapiens
tgaggagcggaggcgggcgcg

SEQ ID NO: 14312 - DNA, 18 bp, Homo sapiens
tgaggagctgcctcgcgc

SEQ ID NO: 14313 - DNA, 19 bp, Homo sapiens
tgaggagctgcctcgcgca

SEQ ID NO: 14314 - DNA, 18 bp, Homo sapiens
tgaggccgctgaggtcgt

SEQ ID NO: 14315 - DNA, 18 bp, Homo sapiens
tgaggcggaactctgagg

SEQ ID NO: 14316 - DNA, 22 bp, Homo sapiens
tgaggcggccgaggcggccagt

SEQ ID NO: 14317 - DNA, 21 bp, Homo sapiens
tgagggctgttgagacgcgag

SEQ ID NO: 14318 - DNA, 18 bp, Homo sapiens
tgaggggagggtagaggg

SEQ ID NO: 14319 - DNA, 22 bp, Homo sapiens
tgaggggctcctgttgcaatgg

SEQ ID NO: 14320 - DNA, 18 bp, Homo sapiens
tgaggggggcgggacggg

SEQ ID NO: 14321 - DNA, 18 bp, Homo sapiens
tgaggggtcagtggttcc

SEQ ID NO: 14322 - DNA, 18 bp, Homo sapiens
tgagggtatcgtggaggc

SEQ ID NO: 14323 - DNA, 20 bp, Homo sapiens
tgagggtcacattgagctgc

SEQ ID NO: 14324 - DNA, 18 bp, Homo sapiens
tgagggtcgggcttgaag

SEQ ID NO: 14325 - DNA, 22 bp, Homo sapiens
tgaggttgaagctgcctccgcc

SEQ ID NO: 14326 - DNA, 20 bp, Homo sapiens
tgagtaacacactgaagcca

SEQ ID NO: 14327 - DNA, 17 bp, Homo sapiens
tgagtaatctcagataa

SEQ ID NO: 14328 - DNA, 19 bp, Homo sapiens
tgagtcaacagactgagcg

SEQ ID NO: 14329 - DNA, 18 bp, Homo sapiens
tgagtccaggcactgcag

SEQ ID NO: 14330 - DNA, 18 bp, Homo sapiens
tgagtgaacaccggccgc

SEQ ID NO: 14331 - DNA, 18 bp, Homo sapiens
tgagtggaagtgtctggc

SEQ ID NO: 14332 - DNA, 17 bp, Homo sapiens
tgagtggagatgtggtc

SEQ ID NO: 14333 - DNA, 23 bp, Homo sapiens
tgagtggcccacgatgggaagag

SEQ ID NO: 14334 - DNA, 19 bp, Homo sapiens
tgagtggcgggttcgggcg

SEQ ID NO: 14335 - DNA, 17 bp, Homo sapiens
tgagtgtctcctgatac

SEQ ID NO: 14336 - DNA, 18 bp, Homo sapiens
tgagttatagctgtgact

SEQ ID NO: 14337 - DNA, 16 bp, Homo sapiens
tgagttgcgaactccg

SEQ ID NO: 14338 - DNA, 17 bp, Homo sapiens
tgatctggaaagcgcga

SEQ ID NO: 14339 - DNA, 21 bp, Homo sapiens
tgatggctttgggggccttgc

SEQ ID NO: 14340 - DNA, 18 bp, Homo sapiens
tgatgtcatgcaggcaag

SEQ ID NO: 14341 - DNA, 18 bp, Homo sapiens
tgatgtcggtgcaggttg

SEQ ID NO: 14342 - DNA, 20 bp, Homo sapiens
tgattagagtttcttccctg

SEQ ID NO: 14343 - DNA, 19 bp, Homo sapiens
tgcaaagctgtgggctgag

SEQ ID NO: 14344 - DNA, 19 bp, Homo sapiens
tgcaacaaggacaaccggc

SEQ ID NO: 14345 - DNA, 19 bp, Homo sapiens
tgcaacggagataaattcc

SEQ ID NO: 14346 - DNA, 20 bp, Homo sapiens
tgcaatatccccacaagggc

SEQ ID NO: 14347 - DNA, 18 bp, Homo sapiens
tgcaatggcgagctaagc

SEQ ID NO: 14348 - DNA, 19 bp, Homo sapiens
tgcaatttaagtaaaacaa

SEQ ID NO: 14349 - DNA, 19 bp, Homo sapiens
tgcacagcgagcggagccg

SEQ ID NO: 14350 - DNA, 18 bp, Homo sapiens
tgcacaggaggagaagca

SEQ ID NO: 14351 - DNA, 22 bp, Homo sapiens
tgcaccgcccgccctgccagac

SEQ ID NO: 14352 - DNA, 19 bp, Homo sapiens
tgcacgcgttactttggct

SEQ ID NO: 14353 - DNA, 23 bp, Homo sapiens
tgcacggcgcttgcatctcttcg

SEQ ID NO: 14354 - DNA, 19 bp, Homo sapiens
tgcactgagtgtggctgaa

SEQ ID NO: 14355 - DNA, 18 bp, Homo sapiens
tgcagaagtgcttccctc

SEQ ID NO: 14356 - DNA, 16 bp, Homo sapiens
tgcagacgcggctcct

SEQ ID NO: 14357 - DNA, 22 bp, Homo sapiens
tgcagagaggcggaatgttcaa

SEQ ID NO: 14358 - DNA, 18 bp, Homo sapiens
tgcagaggattcctgcag

SEQ ID NO: 14359 - DNA, 18 bp, Homo sapiens
cgggttagaacgcgccag

SEQ ID NO: 14360 - DNA, 22 bp, Homo sapiens
cgggttaggaggagctaggctg

SEQ ID NO: 14361 - DNA, 23 bp, Homo sapiens
cgggttaggaggagctaggctgc

SEQ ID NO: 14362 - DNA, 18 bp, Homo sapiens
cgggttgcgcacttcccg

SEQ ID NO: 14363 - DNA, 19 bp, Homo sapiens
cgggttgctttccaaaatg

SEQ ID NO: 14364 - DNA, 21 bp, Homo sapiens
cgggttgctttccaaaatggc

SEQ ID NO: 14365 - DNA, 18 bp, Homo sapiens
cgggttggaggcgcagcg

SEQ ID NO: 14366 - DNA, 17 bp, Homo sapiens
cgggttggcgccccagg

SEQ ID NO: 14367 - DNA, 18 bp, Homo sapiens
cgggttggtggatgacct

SEQ ID NO: 14368 - DNA, 18 bp, Homo sapiens
cgggtttcggttggagga

SEQ ID NO: 14369 - DNA, 20 bp, Homo sapiens
cgggtttggcggggtctttg

SEQ ID NO: 14370 - DNA, 24 bp, Homo sapiens
cggtaacggagaaagtttacgccg

SEQ ID NO: 14371 - DNA, 21 bp, Homo sapiens
cggtaactgagacatagggta

SEQ ID NO: 14372 - DNA, 22 bp, Homo sapiens
cggtaactgcgagagtcggggt

SEQ ID NO: 14373 - DNA, 18 bp, Homo sapiens
cggtaaggagactggggg

SEQ ID NO: 14374 - DNA, 19 bp, Homo sapiens
cggtaagtgtgagacgagc

SEQ ID NO: 14375 - DNA, 18 bp, Homo sapiens
cggtaatgaatggagcgt

SEQ ID NO: 14376 - DNA, 18 bp, Homo sapiens
cggtacatcggggatttc

SEQ ID NO: 14377 - DNA, 21 bp, Homo sapiens
cggtactggacacaacgaggg

SEQ ID NO: 14378 - DNA, 21 bp, Homo sapiens
cggtactgttgaaagcgacaa

SEQ ID NO: 14379 - DNA, 18 bp, Homo sapiens
cggtacttggacagcggt

SEQ ID NO: 14380 - DNA, 18 bp, Homo sapiens
cggtagaggctggtaggg

SEQ ID NO: 14381 - DNA, 20 bp, Homo sapiens
cggtagaggctggtagggta

SEQ ID NO: 14382 - DNA, 18 bp, Homo sapiens
cggtagccgagttccccc

SEQ ID NO: 14383 - DNA, 18 bp, Homo sapiens
cggtagcggacggtcctt

SEQ ID NO: 14384 - DNA, 18 bp, Homo sapiens
cggtagcgtgaaacttgg

SEQ ID NO: 14385 - DNA, 18 bp, Homo sapiens
cggtaggaacatggcgga

SEQ ID NO: 14386 - DNA, 20 bp, Homo sapiens
cggtaggctgctgcggcgag

SEQ ID NO: 14387 - DNA, 17 bp, Homo sapiens
cggtaggggacccgcag

SEQ ID NO: 14388 - DNA, 16 bp, Homo sapiens
cggtagtggagatgtc

SEQ ID NO: 14389 - DNA, 18 bp, Homo sapiens
cggtcagggtccgcgatc

SEQ ID NO: 14390 - DNA, 17 bp, Homo sapiens
cggtcatctccggcgct

SEQ ID NO: 14391 - DNA, 18 bp, Homo sapiens
cggtcatgtgacacagcg

SEQ ID NO: 14392 - DNA, 18 bp, Homo sapiens
cggtcatgtgggcggtca

SEQ ID NO: 14393 - DNA, 21 bp, Homo sapiens
cggtccgcgcgctctctggca

SEQ ID NO: 14394 - DNA, 19 bp, Homo sapiens
cggtccggcagtgcagccg

SEQ ID NO: 14395 - DNA, 16 bp, Homo sapiens
cggtcctgagcgctgc

SEQ ID NO: 14396 - DNA, 19 bp, Homo sapiens
cggtcctgaggagaaggac

SEQ ID NO: 14397 - DNA, 18 bp, Homo sapiens
cggtcgcgccggaggccg

SEQ ID NO: 14398 - DNA, 16 bp, Homo sapiens
cggtcgcgcggccgtc

SEQ ID NO: 14399 - DNA, 17 bp, Homo sapiens
cggtcgcgcggccgtcg

SEQ ID NO: 14400 - DNA, 19 bp, Homo sapiens
cggtcgcgtccgacacccg

SEQ ID NO: 14401 - DNA, 16 bp, Homo sapiens
cggtcggaccaacgga

SEQ ID NO: 14402 - DNA, 18 bp, Homo sapiens
cggtcggcgacggtagaa

SEQ ID NO: 14403 - DNA, 19 bp, Homo sapiens
cggtcgggagggaggaagg

SEQ ID NO: 14404 - DNA, 18 bp, Homo sapiens
cggtcgggccaaggttcc

SEQ ID NO: 14405 - DNA, 20 bp, Homo sapiens
cggtcgggcggaccactgca

SEQ ID NO: 14406 - DNA, 16 bp, Homo sapiens
cggtcgtaagggctga

SEQ ID NO: 14407 - DNA, 18 bp, Homo sapiens
cggtctaggcgaggacgc

SEQ ID NO: 14408 - DNA, 16 bp, Homo sapiens
cggtctccgcgagagg

SEQ ID NO: 14409 - DNA, 17 bp, Homo sapiens
cggtctctcgcgggctg

SEQ ID NO: 14410 - DNA, 19 bp, Homo sapiens
cggtgaaggggcggccccc

SEQ ID NO: 14411 - DNA, 18 bp, Homo sapiens
cggtgaaggtcggaaccg

SEQ ID NO: 14412 - DNA, 18 bp, Homo sapiens
cggtgactgtggagggcg

SEQ ID NO: 14413 - DNA, 17 bp, Homo sapiens
cggtgagaggcggagga

SEQ ID NO: 14414 - DNA, 18 bp, Homo sapiens
cggtgagaggcggaggag

SEQ ID NO: 14415 - DNA, 19 bp, Homo sapiens
cggtgagaggcggaggagc

SEQ ID NO: 14416 - DNA, 18 bp, Homo sapiens
tgcagagtctacttcaga

SEQ ID NO: 14417 - DNA, 18 bp, Homo sapiens
tgcagcgggtgggactgg

SEQ ID NO: 14418 - DNA, 19 bp, Homo sapiens
tgcagctgcagcgggcgtg

SEQ ID NO: 14419 - DNA, 22 bp, Homo sapiens
tgcaggaggtgagagtccccag

SEQ ID NO: 14420 - DNA, 18 bp, Homo sapiens
tgcaggcgcccaagccgc

SEQ ID NO: 14421 - DNA, 23 bp, Homo sapiens
tgcagggaggggtgcgaggctag

SEQ ID NO: 14422 - DNA, 18 bp, Homo sapiens
tgcagggatggcctcctg

SEQ ID NO: 14423 - DNA, 21 bp, Homo sapiens
tgcaggggaaggagtggggcg

SEQ ID NO: 14424 - DNA, 17 bp, Homo sapiens
tgcaggggttacgtttg

SEQ ID NO: 14425 - DNA, 16 bp, Homo sapiens
tgcaggtcctgaaacg

SEQ ID NO: 14426 - DNA, 21 bp, Homo sapiens
tgcaggttgtgcttccggtgc

SEQ ID NO: 14427 - DNA, 17 bp, Homo sapiens
tgcaggtttgagagccg

SEQ ID NO: 14428 - DNA, 18 bp, Homo sapiens
tgcagttggaacgatggc

SEQ ID NO: 14429 - DNA, 24 bp, Homo sapiens
tgcatacttgtgcggttccaagtg

SEQ ID NO: 14430 - DNA, 17 bp, Homo sapiens
tgcatagtgcagaacat

SEQ ID NO: 14431 - DNA, 19 bp, Homo sapiens
tgcattactattgtgcggc

SEQ ID NO: 14432 - DNA, 18 bp, Homo sapiens
tgcattaggctggaggac

SEQ ID NO: 14433 - DNA, 14 bp, Homo sapiens
tgccaacccgcgag

SEQ ID NO: 14434 - DNA, 17 bp, Homo sapiens
tgccactcggctgccgg

SEQ ID NO: 14435 - DNA, 18 bp, Homo sapiens
tgccactcggtgtcctcc

SEQ ID NO: 14436 - DNA, 17 bp, Homo sapiens
tgccactgccacctcgc

SEQ ID NO: 14437 - DNA, 17 bp, Homo sapiens
tgccactgccactgcca

SEQ ID NO: 14438 - DNA, 19 bp, Homo sapiens
tgccactgggccatggaga

SEQ ID NO: 14439 - DNA, 17 bp, Homo sapiens
tgccatcttcggctagg

SEQ ID NO: 14440 - DNA, 20 bp, Homo sapiens
tgccattcagaaagctcgcc

SEQ ID NO: 14441 - DNA, 19 bp, Homo sapiens
tgccattcttaaaggcgcc

SEQ ID NO: 14442 - DNA, 19 bp, Homo sapiens
tgcccacccggagctggga

SEQ ID NO: 14443 - DNA, 17 bp, Homo sapiens
tgcccagaaaggcggcg

SEQ ID NO: 14444 - DNA, 21 bp, Homo sapiens
tgcccccccgcccccgcggcc

SEQ ID NO: 14445 - DNA, 18 bp, Homo sapiens
tgccccctaaagctgagc

SEQ ID NO: 14446 - DNA, 18 bp, Homo sapiens
tgcccctctcccggtgta

SEQ ID NO: 14447 - DNA, 19 bp, Homo sapiens
tgcccctctcccggtgtag

SEQ ID NO: 14448 - DNA, 17 bp, Homo sapiens
tgcccgaagcccgggga

SEQ ID NO: 14449 - DNA, 22 bp, Homo sapiens
tgcccggacgcggagcgagagg

SEQ ID NO: 14450 - DNA, 20 bp, Homo sapiens
tgcccggagcgcagccggcg

SEQ ID NO: 14451 - DNA, 19 bp, Homo sapiens
tgcccggggctgctgctga

SEQ ID NO: 14452 - DNA, 19 bp, Homo sapiens
tgcccggttcttgcactcg

SEQ ID NO: 14453 - DNA, 20 bp, Homo sapiens
tgcccggttcttgcactcgc

SEQ ID NO: 14454 - DNA, 21 bp, Homo sapiens
tgccctcgcttctcagatccc

SEQ ID NO: 14455 - DNA, 22 bp, Homo sapiens
tgccctggcagagctcgccact

SEQ ID NO: 14456 - DNA, 18 bp, Homo sapiens
tgccgcaggttctcttac

SEQ ID NO: 14457 - DNA, 21 bp, Homo sapiens
tgccgcggccgctgggcctga

SEQ ID NO: 14458 - DNA, 23 bp, Homo sapiens
tgccgctgccactgccactgcca

SEQ ID NO: 14459 - DNA, 21 bp, Homo sapiens
tgccgctttctctggcagtag

SEQ ID NO: 14460 - DNA, 17 bp, Homo sapiens
tgccggagctgcagtcg

SEQ ID NO: 14461 - DNA, 16 bp, Homo sapiens
tgccgggaagaggcgc

SEQ ID NO: 14462 - DNA, 16 bp, Homo sapiens
tgccgggcgttgaggg

SEQ ID NO: 14463 - DNA, 18 bp, Homo sapiens
tgccggtgttgcagggag

SEQ ID NO: 14464 - DNA, 20 bp, Homo sapiens
tgccggttggggccggctgt

SEQ ID NO: 14465 - DNA, 17 bp, Homo sapiens
tgccgtagtagcgggcc

SEQ ID NO: 14466 - DNA, 18 bp, Homo sapiens
tgccgtccccgcgtgtga

SEQ ID NO: 14467 - DNA, 18 bp, Homo sapiens
tgccgtcgggtaaggtcc

SEQ ID NO: 14468 - DNA, 18 bp, Homo sapiens
tgccgttgcccgtacaac

SEQ ID NO: 14469 - DNA, 22 bp, Homo sapiens
tgcctacatctgacgtccggag

SEQ ID NO: 14470 - DNA, 18 bp, Homo sapiens
tgcctacgcgccatggag

SEQ ID NO: 14471 - DNA, 19 bp, Homo sapiens
tgcctccaagggttcttaa

SEQ ID NO: 14472 - DNA, 22 bp, Homo sapiens
tgcctgaacctgctaagtccgc

SEQ ID NO: 14473 - DNA, 21 bp, Homo sapiens
cggtgagaggcggaggagcgg

SEQ ID NO: 14474 - DNA, 18 bp, Homo sapiens
cggtgagccgcatggagc

SEQ ID NO: 14475 - DNA, 15 bp, Homo sapiens
cggtgaggccgcggc

SEQ ID NO: 14476 - DNA, 17 bp, Homo sapiens
cggtgaggccgcggcat

SEQ ID NO: 14477 - DNA, 16 bp, Homo sapiens
cggtgagggtagcggc

SEQ ID NO: 14478 - DNA, 23 bp, Homo sapiens
cggtgagtagccgccgcctccag

SEQ ID NO: 14479 - DNA, 16 bp, Homo sapiens
cggtgcaagcggctct

SEQ ID NO: 14480 - DNA, 18 bp, Homo sapiens
cggtgcagcgggacaggg

SEQ ID NO: 14481 - DNA, 18 bp, Homo sapiens
cggtgcaggatctcaacg

SEQ ID NO: 14482 - DNA, 18 bp, Homo sapiens
cggtgcaggcggacgggg

SEQ ID NO: 14483 - DNA, 18 bp, Homo sapiens
cggtgcagtgaaggctcg

SEQ ID NO: 14484 - DNA, 16 bp, Homo sapiens
cggtgccgcgagcccc

SEQ ID NO: 14485 - DNA, 13 bp, Homo sapiens
cggtgcgccgcga

SEQ ID NO: 14486 - DNA, 21 bp, Homo sapiens
cggtgcgcgtagtacgggcgg

SEQ ID NO: 14487 - DNA, 22 bp, Homo sapiens
cggtgcggacgggtcaggagcg

SEQ ID NO: 14488 - DNA, 19 bp, Homo sapiens
cggtgcggagcatttcggc

SEQ ID NO: 14489 - DNA, 24 bp, Homo sapiens
cggtgcggctgtgaggggccgcgt

SEQ ID NO: 14490 - DNA, 18 bp, Homo sapiens
cggtgctcagcaaccacc

SEQ ID NO: 14491 - DNA, 22 bp, Homo sapiens
cggtgctcctggagcgctccgg

SEQ ID NO: 14492 - DNA, 24 bp, Homo sapiens
cggtggaggaaatgcggagccgcg

SEQ ID NO: 14493 - DNA, 16 bp, Homo sapiens
cggtggatcactcggc

SEQ ID NO: 14494 - DNA, 18 bp, Homo sapiens
cggtggatcactcggctc

SEQ ID NO: 14495 - DNA, 20 bp, Homo sapiens
cggtggcagctccgcacctc

SEQ ID NO: 14496 - DNA, 15 bp, Homo sapiens
cggtggcgaaggcgg

SEQ ID NO: 14497 - DNA, 18 bp, Homo sapiens
cggtggcgacgacggccg

SEQ ID NO: 14498 - DNA, 18 bp, Homo sapiens
cggtggctacggtgacgg

SEQ ID NO: 14499 - DNA, 18 bp, Homo sapiens
cggtggctgaggcggctg

SEQ ID NO: 14500 - DNA, 21 bp, Homo sapiens
cggtggctgtaggttgtgcgg

SEQ ID NO: 14501 - DNA, 20 bp, Homo sapiens
cggtgggagaaagtcgcgtc

SEQ ID NO: 14502 - DNA, 22 bp, Homo sapiens
cggtgggccctcgtcctgtcag

SEQ ID NO: 14503 - DNA, 19 bp, Homo sapiens
cggtgggccggggaagtgg

SEQ ID NO: 14504 - DNA, 19 bp, Homo sapiens
cggtgggcgctgcggagac

SEQ ID NO: 14505 - DNA, 18 bp, Homo sapiens
cggtggggcacagacggg

SEQ ID NO: 14506 - DNA, 21 bp, Homo sapiens
cggtggggccgagaggacgcg

SEQ ID NO: 14507 - DNA, 17 bp, Homo sapiens
cggtggggcggcggcgc

SEQ ID NO: 14508 - DNA, 18 bp, Homo sapiens
cggtggtctgaggaagtt

SEQ ID NO: 14509 - DNA, 20 bp, Homo sapiens
cggtggtgatgacggtgaaa

SEQ ID NO: 14510 - DNA, 15 bp, Homo sapiens
cggtggtggtggcgg

SEQ ID NO: 14511 - DNA, 23 bp, Homo sapiens
cggtgtagaaaatggcgctggtg

SEQ ID NO: 14512 - DNA, 19 bp, Homo sapiens
cggtgtctgcggcagcgcc

SEQ ID NO: 14513 - DNA, 18 bp, Homo sapiens
cggtgtggagaagacgcg

SEQ ID NO: 14514 - DNA, 17 bp, Homo sapiens
cggtgtggagcggaggc

SEQ ID NO: 14515 - DNA, 18 bp, Homo sapiens
cggtgtggagcggaggcc

SEQ ID NO: 14516 - DNA, 19 bp, Homo sapiens
cggtgtggagcggaggccg

SEQ ID NO: 14517 - DNA, 17 bp, Homo sapiens
cggtgtggctgtgccgt

SEQ ID NO: 14518 - DNA, 18 bp, Homo sapiens
cggtgtggtgagtaagcg

SEQ ID NO: 14519 - DNA, 18 bp, Homo sapiens
cggttacgcggttgcacg

SEQ ID NO: 14520 - DNA, 18 bp, Homo sapiens
cggttaggggccgccatc

SEQ ID NO: 14521 - DNA, 17 bp, Homo sapiens
cggttataagatggcgg

SEQ ID NO: 14522 - DNA, 19 bp, Homo sapiens
cggttcatagccggagtag

SEQ ID NO: 14523 - DNA, 19 bp, Homo sapiens
cggttccttgtgggctagg

SEQ ID NO: 14524 - DNA, 18 bp, Homo sapiens
cggttcggcaatggacgg

SEQ ID NO: 14525 - DNA, 15 bp, Homo sapiens
cggttgatggccccg

SEQ ID NO: 14526 - DNA, 16 bp, Homo sapiens
cggttgccaaaattca

SEQ ID NO: 14527 - DNA, 18 bp, Homo sapiens
cggttgccggtagattgt

SEQ ID NO: 14528 - DNA, 19 bp, Homo sapiens
cggttgcgggtcggaacgg

SEQ ID NO: 14529 - DNA, 16 bp, Homo sapiens
cggttggagaagaagg

SEQ ID NO: 14530 - DNA, 18 bp, Homo sapiens
tgcctgcgggcgggctgt

SEQ ID NO: 14531 - DNA, 22 bp, Homo sapiens
tgcctggcggggtgcctggtac

SEQ ID NO: 14532 - DNA, 23 bp, Homo sapiens
tgcgaaaggcgagagctgcgaag

SEQ ID NO: 14533 - DNA, 19 bp, Homo sapiens
tgcgaacgaaaaccaccac

SEQ ID NO: 14534 - DNA, 17 bp, Homo sapiens
tgcgaacggagcagctg

SEQ ID NO: 14535 - DNA, 18 bp, Homo sapiens
tgcgaacggagcagctgc

SEQ ID NO: 14536 - DNA, 16 bp, Homo sapiens
tgcgaagatggcggcg

SEQ ID NO: 14537 - DNA, 18 bp, Homo sapiens
tgcgaagggaggtgagcg

SEQ ID NO: 14538 - DNA, 17 bp, Homo sapiens
tgcgactgctgtcggtg

SEQ ID NO: 14539 - DNA, 18 bp, Homo sapiens
tgcgagagaagcggagtg

SEQ ID NO: 14540 - DNA, 18 bp, Homo sapiens
tgcgagctcgtcgtactg

SEQ ID NO: 14541 - DNA, 18 bp, Homo sapiens
tgcgagtacctccatggt

SEQ ID NO: 14542 - DNA, 22 bp, Homo sapiens
tgcgagtggcgggccgactgtg

SEQ ID NO: 14543 - DNA, 19 bp, Homo sapiens
tgcgcacgcgcatggaacg

SEQ ID NO: 14544 - DNA, 16 bp, Homo sapiens
tgcgcacttcagttct

SEQ ID NO: 14545 - DNA, 20 bp, Homo sapiens
tgcgcagcattcggcagagg

SEQ ID NO: 14546 - DNA, 21 bp, Homo sapiens
tgcgcagcattcggcagaggg

SEQ ID NO: 14547 - DNA, 18 bp, Homo sapiens
tgcgcagggaccggtgag

SEQ ID NO: 14548 - DNA, 24 bp, Homo sapiens
tgcgcagtgcggacgtcgccattc

SEQ ID NO: 14549 - DNA, 18 bp, Homo sapiens
tgcgcatgcgcaagaagg

SEQ ID NO: 14550 - DNA, 19 bp, Homo sapiens
tgcgcatgcgtgtcagtgg

SEQ ID NO: 14551 - DNA, 16 bp, Homo sapiens
tgcgcccttcagtatc

SEQ ID NO: 14552 - DNA, 21 bp, Homo sapiens
tgcgccgcctgcgctccgccg

SEQ ID NO: 14553 - DNA, 18 bp, Homo sapiens
tgcgccgggagctggctg

SEQ ID NO: 14554 - DNA, 24 bp, Homo sapiens
tgcgccgtgcccgtgagtccggcg

SEQ ID NO: 14555 - DNA, 16 bp, Homo sapiens
tgcgcctcgcctccct

SEQ ID NO: 14556 - DNA, 23 bp, Homo sapiens
tgcgcgaacgagaaaggaggagg

SEQ ID NO: 14557 - DNA, 16 bp, Homo sapiens
tgcgcgagcgagggac

SEQ ID NO: 14558 - DNA, 18 bp, Homo sapiens
tgcgcgatgtgttactca

SEQ ID NO: 14559 - DNA, 18 bp, Homo sapiens
tgcgcgccatggagggcg

SEQ ID NO: 14560 - DNA, 17 bp, Homo sapiens
tgcgcggacggtctgcg

SEQ ID NO: 14561 - DNA, 19 bp, Homo sapiens
tgcgcggagggctcggcga

SEQ ID NO: 14562 - DNA, 24 bp, Homo sapiens
tgcgcgggtctgtggagagccggg

SEQ ID NO: 14563 - DNA, 16 bp, Homo sapiens
tgcgcgtctctcgttt

SEQ ID NO: 14564 - DNA, 18 bp, Homo sapiens
tgcgcgtcttgttcttgc

SEQ ID NO: 14565 - DNA, 24 bp, Homo sapiens
tgcgctccgggcccgcgcgccatc

SEQ ID NO: 14566 - DNA, 20 bp, Homo sapiens
tgcgctgcagatggcggaaa

SEQ ID NO: 14567 - DNA, 23 bp, Homo sapiens
tgcgctgccgccgctctgaggag

SEQ ID NO: 14568 - DNA, 16 bp, Homo sapiens
tgcgctggggctgccg

SEQ ID NO: 14569 - DNA, 19 bp, Homo sapiens
tgcgcttccggacccggga

SEQ ID NO: 14570 - DNA, 18 bp, Homo sapiens
tgcgcttttgagagtcgc

SEQ ID NO: 14571 - DNA, 18 bp, Homo sapiens
tgcggacagcagctacca

SEQ ID NO: 14572 - DNA, 21 bp, Homo sapiens
tgcggagcatttcggctctga

SEQ ID NO: 14573 - DNA, 18 bp, Homo sapiens
tgcggagcggacggacgc

SEQ ID NO: 14574 - DNA, 18 bp, Homo sapiens
tgcggagcggtgcgcgga

SEQ ID NO: 14575 - DNA, 19 bp, Homo sapiens
tgcggaggtgctcctcgca

SEQ ID NO: 14576 - DNA, 19 bp, Homo sapiens
tgcggcactgttgtcattt

SEQ ID NO: 14577 - DNA, 18 bp, Homo sapiens
tgcggccatggcgagcgg

SEQ ID NO: 14578 - DNA, 17 bp, Homo sapiens
tgcggccccgacttcag

SEQ ID NO: 14579 - DNA, 18 bp, Homo sapiens
tgcggccgcagtagccgg

SEQ ID NO: 14580 - DNA, 17 bp, Homo sapiens
tgcggccttcctcgcgt

SEQ ID NO: 14581 - DNA, 17 bp, Homo sapiens
tgcggcgaggcggaatg

SEQ ID NO: 14582 - DNA, 18 bp, Homo sapiens
tgcggcgctacactagag

SEQ ID NO: 14583 - DNA, 21 bp, Homo sapiens
tgcggctgcggctgccgccat

SEQ ID NO: 14584 - DNA, 18 bp, Homo sapiens
tgcgggaaatggctttaa

SEQ ID NO: 14585 - DNA, 21 bp, Homo sapiens
tgcgggattccgatctgcgcc

SEQ ID NO: 14586 - DNA, 23 bp, Homo sapiens
tgcgggccggccgctgcccttcc

SEQ ID NO: 14587 - DNA, 16 bp, Homo sapiens
cggttgtctggagccc

SEQ ID NO: 14588 - DNA, 18 bp, Homo sapiens
cggttgtgtaacggcctg

SEQ ID NO: 14589 - DNA, 20 bp, Homo sapiens
cggttgtgtgaagatggagg

SEQ ID NO: 14590 - DNA, 18 bp, Homo sapiens
cggttgtttgaccgagag

SEQ ID NO: 14591 - DNA, 20 bp, Homo sapiens
cggtttagtgtaattgccgc

SEQ ID NO: 14592 - DNA, 18 bp, Homo sapiens
cggtttccctccagacag

SEQ ID NO: 14593 - DNA, 18 bp, Homo sapiens
cggtttcctggggctatg

SEQ ID NO: 14594 - DNA, 18 bp, Homo sapiens
cggtttcggtagcgacgg

SEQ ID NO: 14595 - DNA, 18 bp, Homo sapiens
cggtttctgaggttcttc

SEQ ID NO: 14596 - DNA, 21 bp, Homo sapiens
cggtttctgaggttcttcact

SEQ ID NO: 14597 - DNA, 17 bp, Homo sapiens
cggtttggccctgactg

SEQ ID NO: 14598 - DNA, 18 bp, Homo sapiens
cggttttcgggcaggcct

SEQ ID NO: 14599 - DNA, 24 bp, Homo sapiens
cggttttggctgtgtgaggaagac

SEQ ID NO: 14600 - DNA, 18 bp, Homo sapiens
cggtttttcgacgctggc

SEQ ID NO: 14601 - DNA, 19 bp, Homo sapiens
cgtaagagttagggtttga

SEQ ID NO: 14602 - DNA, 22 bp, Homo sapiens
cgtaaggccacttccgcacacc

SEQ ID NO: 14603 - DNA, 18 bp, Homo sapiens
cgtacagggctggatgat

SEQ ID NO: 14604 - DNA, 18 bp, Homo sapiens
cgtaccgtcgcggatttc

SEQ ID NO: 14605 - DNA, 17 bp, Homo sapiens
cgtactaggtagatggt

SEQ ID NO: 14606 - DNA, 19 bp, Homo sapiens
cgtactcccctcccagcaa

SEQ ID NO: 14607 - DNA, 18 bp, Homo sapiens
cgtactcctgcgagcgcc

SEQ ID NO: 14608 - DNA, 20 bp, Homo sapiens
cgtagaaaagatggctgctg

SEQ ID NO: 14609 - DNA, 18 bp, Homo sapiens
cgtagagcactgcagcag

SEQ ID NO: 14610 - DNA, 19 bp, Homo sapiens
cgtagccggctgctcccgc

SEQ ID NO: 14611 - DNA, 18 bp, Homo sapiens
cgtagcctcttccggcga

SEQ ID NO: 14612 - DNA, 19 bp, Homo sapiens
cgtaggcgctggccgctga

SEQ ID NO: 14613 - DNA, 18 bp, Homo sapiens
cgtaggcttggtggactg

SEQ ID NO: 14614 - DNA, 19 bp, Homo sapiens
cgtagtcatggccgccttc

SEQ ID NO: 14615 - DNA, 18 bp, Homo sapiens
cgtcagttgctccgctgc

SEQ ID NO: 14616 - DNA, 17 bp, Homo sapiens
cgtcagtttcctcggca

SEQ ID NO: 14617 - DNA, 18 bp, Homo sapiens
cgtccccctcccccaaac

SEQ ID NO: 14618 - DNA, 22 bp, Homo sapiens
cgtccccgccacccgtgatcgt

SEQ ID NO: 14619 - DNA, 19 bp, Homo sapiens
cgtcccgcccggcgccagc

SEQ ID NO: 14620 - DNA, 18 bp, Homo sapiens
cgtcccggtgtggctgtg

SEQ ID NO: 14621 - DNA, 24 bp, Homo sapiens
cgtccctgtaggttcctttcactc

SEQ ID NO: 14622 - DNA, 19 bp, Homo sapiens
cgtccgcccactccgcggc

SEQ ID NO: 14623 - DNA, 22 bp, Homo sapiens
cgtccgctgaggctcggtcacc

SEQ ID NO: 14624 - DNA, 19 bp, Homo sapiens
cgtccgtggtcctcccgta

SEQ ID NO: 14625 - DNA, 16 bp, Homo sapiens
cgtcctcttgtgtagc

SEQ ID NO: 14626 - DNA, 17 bp, Homo sapiens
cgtccttccggctccgt

SEQ ID NO: 14627 - DNA, 19 bp, Homo sapiens
cgtccttccggctccgtcg

SEQ ID NO: 14628 - DNA, 18 bp, Homo sapiens
cgtcgaggggaggccgag

SEQ ID NO: 14629 - DNA, 20 bp, Homo sapiens
cgtcgcattgccgtttttgc

SEQ ID NO: 14630 - DNA, 17 bp, Homo sapiens
cgtcgccccggtttgac

SEQ ID NO: 14631 - DNA, 18 bp, Homo sapiens
cgtcgccccggtttgacg

SEQ ID NO: 14632 - DNA, 16 bp, Homo sapiens
cgtcgcggccgcggag

SEQ ID NO: 14633 - DNA, 18 bp, Homo sapiens
cgtcgcgtcgctcctgcg

SEQ ID NO: 14634 - DNA, 17 bp, Homo sapiens
cgtcgctgcagcgacac

SEQ ID NO: 14635 - DNA, 18 bp, Homo sapiens
cgtcggcggggttggccg

SEQ ID NO: 14636 - DNA, 18 bp, Homo sapiens
cgtcgggatatcgggtgg

SEQ ID NO: 14637 - DNA, 19 bp, Homo sapiens
cgtcgggatatcgggtggc

SEQ ID NO: 14638 - DNA, 22 bp, Homo sapiens
cgtcgggatatcgggtggcggc

SEQ ID NO: 14639 - DNA, 16 bp, Homo sapiens
cgtcgggtaaggtccc

SEQ ID NO: 14640 - DNA, 18 bp, Homo sapiens
cgtcgggtgtgagctgcg

SEQ ID NO: 14641 - DNA, 18 bp, Homo sapiens
cgtcgtaacgcctcgggg

SEQ ID NO: 14642 - DNA, 21 bp, Homo sapiens
cgtcgtggaagcaggactgcg

SEQ ID NO: 14643 - DNA, 16 bp, Homo sapiens
cgtctcaggtcgccgc

SEQ ID NO: 14644 - DNA, 19 bp, Homo sapiens
tgcgggcgcaatggaggag

SEQ ID NO: 14645 - DNA, 18 bp, Homo sapiens
tgcgggcggcccccctcc

SEQ ID NO: 14646 - DNA, 20 bp, Homo sapiens
tgcggggcgttccctcgggt

SEQ ID NO: 14647 - DNA, 22 bp, Homo sapiens
tgcggggctgctggcggctctg

SEQ ID NO: 14648 - DNA, 24 bp, Homo sapiens
tgcgggggatcagctgacgctccg

SEQ ID NO: 14649 - DNA, 22 bp, Homo sapiens
tgcgggtaaacagacatggccg

SEQ ID NO: 14650 - DNA, 18 bp, Homo sapiens
tgcggtaacaccgttcac

SEQ ID NO: 14651 - DNA, 21 bp, Homo sapiens
tgcggtaggaacatggcggat

SEQ ID NO: 14652 - DNA, 19 bp, Homo sapiens
tgcggtctctcgcgggctg

SEQ ID NO: 14653 - DNA, 18 bp, Homo sapiens
tgcggtgaggggaccgcc

SEQ ID NO: 14654 - DNA, 20 bp, Homo sapiens
tgcgtcgtgctatgaccgga

SEQ ID NO: 14655 - DNA, 18 bp, Homo sapiens
tgcgtcgttccggcgcgg

SEQ ID NO: 14656 - DNA, 14 bp, Homo sapiens
tgcgtgcgggccgc

SEQ ID NO: 14657 - DNA, 22 bp, Homo sapiens
tgcgtggccgtctcctcctcta

SEQ ID NO: 14658 - DNA, 16 bp, Homo sapiens
tgcgtggggcggggcc

SEQ ID NO: 14659 - DNA, 19 bp, Homo sapiens
tgcgttcggcaggcgctgc

SEQ ID NO: 14660 - DNA, 17 bp, Homo sapiens
tgcgttgggattccgtg

SEQ ID NO: 14661 - DNA, 19 bp, Homo sapiens
tgctacctagtgggtcttg

SEQ ID NO: 14662 - DNA, 17 bp, Homo sapiens
tgctacgagtagaacgc

SEQ ID NO: 14663 - DNA, 19 bp, Homo sapiens
tgctcagagtgtggtcagg

SEQ ID NO: 14664 - DNA, 19 bp, Homo sapiens
tgctcagtttccttcagcg

SEQ ID NO: 14665 - DNA, 18 bp, Homo sapiens
tgctccctccacccccac

SEQ ID NO: 14666 - DNA, 18 bp, Homo sapiens
tgctccgccgcagcgacc

SEQ ID NO: 14667 - DNA, 17 bp, Homo sapiens
tgctccgctgctgctgt

SEQ ID NO: 14668 - DNA, 21 bp, Homo sapiens
tgctccggcggctggaggcgt

SEQ ID NO: 14669 - DNA, 16 bp, Homo sapiens
tgctcctccacccccg

SEQ ID NO: 14670 - DNA, 18 bp, Homo sapiens
tgctcgagccgcgtctgc

SEQ ID NO: 14671 - DNA, 17 bp, Homo sapiens
tgctcgaggcctgggtg

SEQ ID NO: 14672 - DNA, 18 bp, Homo sapiens
tgctcggtgcgaggcggc

SEQ ID NO: 14673 - DNA, 21 bp, Homo sapiens
tgctcttccctattctcacca

SEQ ID NO: 14674 - DNA, 17 bp, Homo sapiens
tgctgagagacggtggc

SEQ ID NO: 14675 - DNA, 18 bp, Homo sapiens
tgctgataaaggctcgcc

SEQ ID NO: 14676 - DNA, 21 bp, Homo sapiens
tgctgcacagcgagcggagcc

SEQ ID NO: 14677 - DNA, 20 bp, Homo sapiens
tgctgcagcaacgcgagtgg

SEQ ID NO: 14678 - DNA, 18 bp, Homo sapiens
tgctgcccagtcgcgccg

SEQ ID NO: 14679 - DNA, 17 bp, Homo sapiens
tgctgccccgagccctg

SEQ ID NO: 14680 - DNA, 20 bp, Homo sapiens
tgctgccggagcgccggcgc

SEQ ID NO: 14681 - DNA, 17 bp, Homo sapiens
tgctgccgttgcccgta

SEQ ID NO: 14682 - DNA, 15 bp, Homo sapiens
tgctgcgcagctccc

SEQ ID NO: 14683 - DNA, 24 bp, Homo sapiens
tgctgcgctccgcgggctctcaga

SEQ ID NO: 14684 - DNA, 17 bp, Homo sapiens
tgctgctgttctgcccc

SEQ ID NO: 14685 - DNA, 18 bp, Homo sapiens
tgctgcttatggcggcgc

SEQ ID NO: 14686 - DNA, 19 bp, Homo sapiens
tgctggaagcgcgtgaggc

SEQ ID NO: 14687 - DNA, 23 bp, Homo sapiens
tgctggacctgggcaccgccagc

SEQ ID NO: 14688 - DNA, 17 bp, Homo sapiens
tgctggagcctgcgacc

SEQ ID NO: 14689 - DNA, 18 bp, Homo sapiens
tgctggatgtgaaatggc

SEQ ID NO: 14690 - DNA, 21 bp, Homo sapiens
tgctggcggctctgcagagtc

SEQ ID NO: 14691 - DNA, 22 bp, Homo sapiens
tgctgggaaatgtagtttccgg

SEQ ID NO: 14692 - DNA, 20 bp, Homo sapiens
tgctgggtaggcgacccgga

SEQ ID NO: 14693 - DNA, 20 bp, Homo sapiens
tgctgtaaggccgaggttgc

SEQ ID NO: 14694 - DNA, 18 bp, Homo sapiens
tgctgtctgcggaggaaa

SEQ ID NO: 14695 - DNA, 21 bp, Homo sapiens
tgctgtgcccatctatcagca

SEQ ID NO: 14696 - DNA, 18 bp, Homo sapiens
tgctgtggcccagacgag

SEQ ID NO: 14697 - DNA, 16 bp, Homo sapiens
tgctgttattgtgact

SEQ ID NO: 14698 - DNA, 20 bp, Homo sapiens
tgcttaatgaggacttgact

SEQ ID NO: 14699 - DNA, 18 bp, Homo sapiens
tgcttagtcatcgggtcc

SEQ ID NO: 14700 - DNA, 18 bp, Homo sapiens
tgcttagttttgctgccg

SEQ ID NO: 14701 - DNA, 18 bp, Homo sapiens
cgtctctgggcttttgct

SEQ ID NO: 14702 - DNA, 22 bp, Homo sapiens
cgtctgcacgggtctcggaccg

SEQ ID NO: 14703 - DNA, 18 bp, Homo sapiens
cgtctgcggccgcggctc

SEQ ID NO: 14704 - DNA, 17 bp, Homo sapiens
cgtctggagcactgaca

SEQ ID NO: 14705 - DNA, 15 bp, Homo sapiens
cgtctgtcgcggctg

SEQ ID NO: 14706 - DNA, 18 bp, Homo sapiens
cgtctgtggggtcgagac

SEQ ID NO: 14707 - DNA, 20 bp, Homo sapiens
cgtcttcgcccgccatggcc

SEQ ID NO: 14708 - DNA, 18 bp, Homo sapiens
cgtcttgcattactattg

SEQ ID NO: 14709 - DNA, 17 bp, Homo sapiens
cgtgaaagactgccggg

SEQ ID NO: 14710 - DNA, 16 bp, Homo sapiens
cgtgacggaggagcgg

SEQ ID NO: 14711 - DNA, 19 bp, Homo sapiens
cgtgacgggtcggtggcgc

SEQ ID NO: 14712 - DNA, 19 bp, Homo sapiens
cgtgactaagatggaagcg

SEQ ID NO: 14713 - DNA, 16 bp, Homo sapiens
cgtgactagtgaggtg

SEQ ID NO: 14714 - DNA, 18 bp, Homo sapiens
cgtgagcagccggaggat

SEQ ID NO: 14715 - DNA, 18 bp, Homo sapiens
cgtgagcggcgctgagtg

SEQ ID NO: 14716 - DNA, 19 bp, Homo sapiens
cgtgaggcgcgcgatcccc

SEQ ID NO: 14717 - DNA, 17 bp, Homo sapiens
cgtgatctgtcagttcg

SEQ ID NO: 14718 - DNA, 18 bp, Homo sapiens
cgtgcaagctctggccgg

SEQ ID NO: 14719 - DNA, 18 bp, Homo sapiens
cgtgcagggccccgccgc

SEQ ID NO: 14720 - DNA, 20 bp, Homo sapiens
cgtgccattcttaaaggcgc

SEQ ID NO: 14721 - DNA, 23 bp, Homo sapiens
cgtgccattcttaaaggcgcccg

SEQ ID NO: 14722 - DNA, 22 bp, Homo sapiens
cgtgcccccaggccgcgctcta

SEQ ID NO: 14723 - DNA, 17 bp, Homo sapiens
cgtgccctgtttttcgg

SEQ ID NO: 14724 - DNA, 19 bp, Homo sapiens
cgtgccggtcgctagtcgc

SEQ ID NO: 14725 - DNA, 24 bp, Homo sapiens
cgtgccgtagggaacatgcacttt

SEQ ID NO: 14726 - DNA, 17 bp, Homo sapiens
cgtgcgaggactccaga

SEQ ID NO: 14727 - DNA, 19 bp, Homo sapiens
cgtgcgccggtggcgggac

SEQ ID NO: 14728 - DNA, 13 bp, Homo sapiens
cgtgcgcgctacg

SEQ ID NO: 14729 - DNA, 18 bp, Homo sapiens
cgtgcgcggcggagactg

SEQ ID NO: 14730 - DNA, 18 bp, Homo sapiens
cgtgcggcaggtaccatg

SEQ ID NO: 14731 - DNA, 21 bp, Homo sapiens
cgtggaaagaggagaagggcg

SEQ ID NO: 14732 - DNA, 18 bp, Homo sapiens
cgtggaaggtggccaggc

SEQ ID NO: 14733 - DNA, 18 bp, Homo sapiens
cgtggacctgggacgggt

SEQ ID NO: 14734 - DNA, 17 bp, Homo sapiens
cgtggacgccgtgccgt

SEQ ID NO: 14735 - DNA, 17 bp, Homo sapiens
cgtggacggggccagat

SEQ ID NO: 14736 - DNA, 18 bp, Homo sapiens
cgtggagggtttaggcag

SEQ ID NO: 14737 - DNA, 17 bp, Homo sapiens
cgtggatctcatcgaag

SEQ ID NO: 14738 - DNA, 19 bp, Homo sapiens
cgtggccggtacgagctgc

SEQ ID NO: 14739 - DNA, 18 bp, Homo sapiens
cgtggcgcaggcgaatcc

SEQ ID NO: 14740 - DNA, 21 bp, Homo sapiens
cgtggcgcccgagtgcactga

SEQ ID NO: 14741 - DNA, 20 bp, Homo sapiens
cgtggcggctgcacgagcag

SEQ ID NO: 14742 - DNA, 18 bp, Homo sapiens
cgtggcgggatggtatag

SEQ ID NO: 14743 - DNA, 23 bp, Homo sapiens
cgtggcgggttgctttccaaaat

SEQ ID NO: 14744 - DNA, 18 bp, Homo sapiens
cgtgggaagatggcggac

SEQ ID NO: 14745 - DNA, 18 bp, Homo sapiens
cgtgggagctgagcacgg

SEQ ID NO: 14746 - DNA, 16 bp, Homo sapiens
cgtgggccttcggggg

SEQ ID NO: 14747 - DNA, 18 bp, Homo sapiens
cgtgggctgtggaggcga

SEQ ID NO: 14748 - DNA, 22 bp, Homo sapiens
cgtggggagagggccgcgtctg

SEQ ID NO: 14749 - DNA, 18 bp, Homo sapiens
cgtgggggagactgttcc

SEQ ID NO: 14750 - DNA, 23 bp, Homo sapiens
cgtgggtcccgaactccgcctcg

SEQ ID NO: 14751 - DNA, 20 bp, Homo sapiens
cgtgggtccttagtcaagtg

SEQ ID NO: 14752 - DNA, 21 bp, Homo sapiens
cgtggtgggcagcgagttcgg

SEQ ID NO: 14753 - DNA, 19 bp, Homo sapiens
cgtgtacccggttgtcctc

SEQ ID NO: 14754 - DNA, 20 bp, Homo sapiens
cgtgtgagtctctttcgcct

SEQ ID NO: 14755 - DNA, 20 bp, Homo sapiens
cgtgtgtagttggcatctcc

SEQ ID NO: 14756 - DNA, 21 bp, Homo sapiens
cgtgtgtagttggcatctccg

SEQ ID NO: 14757 - DNA, 17 bp, Homo sapiens
cgttacatgcccttctt

SEQ ID NO: 14758 - DNA, 18 bp, Homo sapiens
tgcttcaagatgaaggta

SEQ ID NO: 14759 - DNA, 20 bp, Homo sapiens
tgcttcagggtctagcccag

SEQ ID NO: 14760 - DNA, 18 bp, Homo sapiens
tgcttccccggctgcctg

SEQ ID NO: 14761 - DNA, 18 bp, Homo sapiens
tgcttccgctggagcctc

SEQ ID NO: 14762 - DNA, 18 bp, Homo sapiens
tgcttccggctcgaattg

SEQ ID NO: 14763 - DNA, 16 bp, Homo sapiens
tgcttcctgtttgtcc

SEQ ID NO: 14764 - DNA, 18 bp, Homo sapiens
tgcttcgccgccgcctcc

SEQ ID NO: 14765 - DNA, 18 bp, Homo sapiens
tgcttctcttttccttgg

SEQ ID NO: 14766 - DNA, 18 bp, Homo sapiens
tgcttctgggtcgcggtg

SEQ ID NO: 14767 - DNA, 18 bp, Homo sapiens
tgcttggatcagtctagg

SEQ ID NO: 14768 - DNA, 17 bp, Homo sapiens
tgctttctgaggccaca

SEQ ID NO: 14769 - DNA, 21 bp, Homo sapiens
tggaaaatatagacgagttcg

SEQ ID NO: 14770 - DNA, 18 bp, Homo sapiens
tggaaaatgccaccagat

SEQ ID NO: 14771 - DNA, 16 bp, Homo sapiens
tggaacgggagtactg

SEQ ID NO: 14772 - DNA, 17 bp, Homo sapiens
tggaactggcaggcacc

SEQ ID NO: 14773 - DNA, 18 bp, Homo sapiens
tggaactggcaggcaccg

SEQ ID NO: 14774 - DNA, 20 bp, Homo sapiens
tggaagaccaggcagcccag

SEQ ID NO: 14775 - DNA, 17 bp, Homo sapiens
tggaagactaccaggct

SEQ ID NO: 14776 - DNA, 16 bp, Homo sapiens
tggaagatggcgagcg

SEQ ID NO: 14777 - DNA, 19 bp, Homo sapiens
tggaagctcagctgatgca

SEQ ID NO: 14778 - DNA, 22 bp, Homo sapiens
tggaaggatttcgctgcttccc

SEQ ID NO: 14779 - DNA, 16 bp, Homo sapiens
tggaagtgtctcttag

SEQ ID NO: 14780 - DNA, 17 bp, Homo sapiens
tggaatgagggtagctg

SEQ ID NO: 14781 - DNA, 18 bp, Homo sapiens
tggacatggcggccggcc

SEQ ID NO: 14782 - DNA, 19 bp, Homo sapiens
tggaccaaccacgtcttcc

SEQ ID NO: 14783 - DNA, 17 bp, Homo sapiens
tggaccgaagccagctg

SEQ ID NO: 14784 - DNA, 16 bp, Homo sapiens
tggaccgagagagagc

SEQ ID NO: 14785 - DNA, 19 bp, Homo sapiens
tggaccttgctggcccgcg

SEQ ID NO: 14786 - DNA, 20 bp, Homo sapiens
tggacgaggtcttcttcaac

SEQ ID NO: 14787 - DNA, 18 bp, Homo sapiens
tggacgcgaggagccggg

SEQ ID NO: 14788 - DNA, 20 bp, Homo sapiens
tggacgtaagcttagcggtg

SEQ ID NO: 14789 - DNA, 16 bp, Homo sapiens
tggacgtggagaagag

SEQ ID NO: 14790 - DNA, 17 bp, Homo sapiens
tggacgtggcaagcaag

SEQ ID NO: 14791 - DNA, 18 bp, Homo sapiens
tggacgtggcaagcaagg

SEQ ID NO: 14792 - DNA, 17 bp, Homo sapiens
tggactcggtggagaag

SEQ ID NO: 14793 - DNA, 18 bp, Homo sapiens
tggactgagaagctacgg

SEQ ID NO: 14794 - DNA, 17 bp, Homo sapiens
tggactggacaaagcgg

SEQ ID NO: 14795 - DNA, 17 bp, Homo sapiens
tggacttggcggcagag

SEQ ID NO: 14796 - DNA, 18 bp, Homo sapiens
tggagaagccacccagcc

SEQ ID NO: 14797 - DNA, 18 bp, Homo sapiens
tggagaagtacgagcgga

SEQ ID NO: 14798 - DNA, 18 bp, Homo sapiens
tggagaccggagaagctg

SEQ ID NO: 14799 - DNA, 17 bp, Homo sapiens
tggagacggcctgggtg

SEQ ID NO: 14800 - DNA, 19 bp, Homo sapiens
tggagacggttgggagaac

SEQ ID NO: 14801 - DNA, 18 bp, Homo sapiens
tggagactgtggcacagt

SEQ ID NO: 14802 - DNA, 20 bp, Homo sapiens
tggagacttcggggccaaga

SEQ ID NO: 14803 - DNA, 18 bp, Homo sapiens
tggagagaagcaggcctg

SEQ ID NO: 14804 - DNA, 20 bp, Homo sapiens
tggagagggcgagaagggca

SEQ ID NO: 14805 - DNA, 18 bp, Homo sapiens
tggagatcaatgaagccg

SEQ ID NO: 14806 - DNA, 18 bp, Homo sapiens
tggagatggcgggagctg

SEQ ID NO: 14807 - DNA, 21 bp, Homo sapiens
tggagcacgtaggtggcgggg

SEQ ID NO: 14808 - DNA, 17 bp, Homo sapiens
tggagcccgctcagagc

SEQ ID NO: 14809 - DNA, 22 bp, Homo sapiens
tggagccgaagctcggctcgtg

SEQ ID NO: 14810 - DNA, 18 bp, Homo sapiens
tggagcgcagagcggttt

SEQ ID NO: 14811 - DNA, 19 bp, Homo sapiens
tggagcgcagagcggtttg

SEQ ID NO: 14812 - DNA, 18 bp, Homo sapiens
tggagctcggggtgtttc

SEQ ID NO: 14813 - DNA, 22 bp, Homo sapiens
tggaggcagcggagacagaggc

SEQ ID NO: 14814 - DNA, 18 bp, Homo sapiens
tggaggcaggctgggcgg

SEQ ID NO: 14815 - DNA, 22 bp, Homo sapiens
cgttaggaggctcgggtcgttg

SEQ ID NO: 14816 - DNA, 21 bp, Homo sapiens
cgttcaacccgttctgctggc

SEQ ID NO: 14817 - DNA, 23 bp, Homo sapiens
cgttcaacgacttactggggaga

SEQ ID NO: 14818 - DNA, 18 bp, Homo sapiens
cgttccatcgtcgcgcgg

SEQ ID NO: 14819 - DNA, 18 bp, Homo sapiens
cgttccgtgggcagaggt

SEQ ID NO: 14820 - DNA, 18 bp, Homo sapiens
cgttccttcgccgccgcc

SEQ ID NO: 14821 - DNA, 18 bp, Homo sapiens
cgttctccggaagtgcgc

SEQ ID NO: 14822 - DNA, 17 bp, Homo sapiens
cgttgacctgggaagca

SEQ ID NO: 14823 - DNA, 18 bp, Homo sapiens
cgttgaggggagttccag

SEQ ID NO: 14824 - DNA, 14 bp, Homo sapiens
cgttgcggccttcc

SEQ ID NO: 14825 - DNA, 17 bp, Homo sapiens
cgttggagtcataagac

SEQ ID NO: 14826 - DNA, 19 bp, Homo sapiens
cgttggcgctgcagcgggg

SEQ ID NO: 14827 - DNA, 18 bp, Homo sapiens
cgttggcgggggtgggag

SEQ ID NO: 14828 - DNA, 18 bp, Homo sapiens
cgttgggctccgggaagc

SEQ ID NO: 14829 - DNA, 16 bp, Homo sapiens
cgttggggactaaggc

SEQ ID NO: 14830 - DNA, 16 bp, Homo sapiens
cgtttacagttcggca

SEQ ID NO: 14831 - DNA, 19 bp, Homo sapiens
cgtttcaggaccgttggca

SEQ ID NO: 14832 - DNA, 19 bp, Homo sapiens
cgtttccgggagcgccgcg

SEQ ID NO: 14833 - DNA, 19 bp, Homo sapiens
cgtttcgggcagagctcgg

SEQ ID NO: 14834 - DNA, 17 bp, Homo sapiens
cgttttccgctcatggc

SEQ ID NO: 14835 - DNA, 17 bp, Homo sapiens
ctaaaagggactcccgg

SEQ ID NO: 14836 - DNA, 18 bp, Homo sapiens
ctaaaatggaggctggtt

SEQ ID NO: 14837 - DNA, 21 bp, Homo sapiens
ctaaagccgggagtccggtga

SEQ ID NO: 14838 - DNA, 18 bp, Homo sapiens
ctaaagtgagtgagtgag

SEQ ID NO: 14839 - DNA, 18 bp, Homo sapiens
ctaagaaggggagactga

SEQ ID NO: 14840 - DNA, 21 bp, Homo sapiens
ctaagcagccggtgatggcgg

SEQ ID NO: 14841 - DNA, 18 bp, Homo sapiens
ctaaggcgcccgaacccg

SEQ ID NO: 14842 - DNA, 18 bp, Homo sapiens
ctaatatccgggaatgga

SEQ ID NO: 14843 - DNA, 18 bp, Homo sapiens
ctaatcaagaagttggcg

SEQ ID NO: 14844 - DNA, 20 bp, Homo sapiens
ctaatccgcgagacttgcta

SEQ ID NO: 14845 - DNA, 20 bp, Homo sapiens
ctaattgaggaaactgtggc

SEQ ID NO: 14846 - DNA, 18 bp, Homo sapiens
ctacaaaggacttcctag

SEQ ID NO: 14847 - DNA, 19 bp, Homo sapiens
ctacagccgggaacgcgcc

SEQ ID NO: 14848 - DNA, 19 bp, Homo sapiens
ctacagcgcggagactggg

SEQ ID NO: 14849 - DNA, 24 bp, Homo sapiens
ctacaggaggacgcgggctggcag

SEQ ID NO: 14850 - DNA, 20 bp, Homo sapiens
ctaccagtcccaggctgccc

SEQ ID NO: 14851 - DNA, 14 bp, Homo sapiens
ctaccgcgccggac

SEQ ID NO: 14852 - DNA, 19 bp, Homo sapiens
ctaccggcgggatttgatg

SEQ ID NO: 14853 - DNA, 17 bp, Homo sapiens
ctacctagtgggtcttg

SEQ ID NO: 14854 - DNA, 19 bp, Homo sapiens
ctacgaagcgagcttggga

SEQ ID NO: 14855 - DNA, 17 bp, Homo sapiens
ctacgacgatcgggcct

SEQ ID NO: 14856 - DNA, 19 bp, Homo sapiens
ctacgacgatcgggcctac

SEQ ID NO: 14857 - DNA, 18 bp, Homo sapiens
ctacgatgcctgaaccta

SEQ ID NO: 14858 - DNA, 20 bp, Homo sapiens
ctacgcggcaggtcacgtga

SEQ ID NO: 14859 - DNA, 18 bp, Homo sapiens
ctacggctgactgggaaa

SEQ ID NO: 14860 - DNA, 18 bp, Homo sapiens
ctacggctggtgtgggcc

SEQ ID NO: 14861 - DNA, 15 bp, Homo sapiens
ctacggtgctgaagc

SEQ ID NO: 14862 - DNA, 18 bp, Homo sapiens
ctacgtagggcagagaag

SEQ ID NO: 14863 - DNA, 19 bp, Homo sapiens
ctacgtctgtgcggctgcg

SEQ ID NO: 14864 - DNA, 18 bp, Homo sapiens
ctacgtgcgactgtgggg

SEQ ID NO: 14865 - DNA, 20 bp, Homo sapiens
ctactcaaatgcagtcggct

SEQ ID NO: 14866 - DNA, 18 bp, Homo sapiens
ctactccaggaggaaagc

SEQ ID NO: 14867 - DNA, 16 bp, Homo sapiens
ctactgcaaggcaaaa

SEQ ID NO: 14868 - DNA, 20 bp, Homo sapiens
ctactggagaccactttagg

SEQ ID NO: 14869 - DNA, 21 bp, Homo sapiens
ctactttgcccgcccacagat

SEQ ID NO: 14870 - DNA, 18 bp, Homo sapiens
ctagaagacagcagggga

SEQ ID NO: 14871 - DNA, 20 bp, Homo sapiens
ctagaagcgctgcgggaagc

SEQ ID NO: 14872 - DNA, 18 bp, Homo sapiens
tggaggcgcgcaggccgg

SEQ ID NO: 14873 - DNA, 18 bp, Homo sapiens
tggaggcgctgagtcgag

SEQ ID NO: 14874 - DNA, 18 bp, Homo sapiens
tggaggcggcggacgcgg

SEQ ID NO: 14875 - DNA, 18 bp, Homo sapiens
tggaggctgcgttcggca

SEQ ID NO: 14876 - DNA, 23 bp, Homo sapiens
tggaggggaaacagcggaagacc

SEQ ID NO: 14877 - DNA, 18 bp, Homo sapiens
tggaggttggaggtggtg

SEQ ID NO: 14878 - DNA, 18 bp, Homo sapiens
tggagtaagaatggcctt

SEQ ID NO: 14879 - DNA, 20 bp, Homo sapiens
tggagtagcactgagatctt

SEQ ID NO: 14880 - DNA, 21 bp, Homo sapiens
tggagtccatggtgaagagtc

SEQ ID NO: 14881 - DNA, 17 bp, Homo sapiens
tggagtccgggcagagc

SEQ ID NO: 14882 - DNA, 22 bp, Homo sapiens
tggagtcctgggacctagctcg

SEQ ID NO: 14883 - DNA, 17 bp, Homo sapiens
tggagtggcgtagacga

SEQ ID NO: 14884 - DNA, 18 bp, Homo sapiens
tggagtggcgtagacgag

SEQ ID NO: 14885 - DNA, 18 bp, Homo sapiens
tggagttggtggtggctt

SEQ ID NO: 14886 - DNA, 19 bp, Homo sapiens
tggagttggtggtggctta

SEQ ID NO: 14887 - DNA, 18 bp, Homo sapiens
tggatcccgtacccggga

SEQ ID NO: 14888 - DNA, 16 bp, Homo sapiens
tggatgggctcgctag

SEQ ID NO: 14889 - DNA, 18 bp, Homo sapiens
tggatgtctgacaggtga

SEQ ID NO: 14890 - DNA, 17 bp, Homo sapiens
tggcaagaagcgcaagc

SEQ ID NO: 14891 - DNA, 18 bp, Homo sapiens
tggcaagaggcgaagcgg

SEQ ID NO: 14892 - DNA, 18 bp, Homo sapiens
tggcaagtaaccatagcg

SEQ ID NO: 14893 - DNA, 22 bp, Homo sapiens
tggcacccaacgtgggctggtg

SEQ ID NO: 14894 - DNA, 16 bp, Homo sapiens
tggcactgtggcggac

SEQ ID NO: 14895 - DNA, 21 bp, Homo sapiens
tggcagacagggccacaactc

SEQ ID NO: 14896 - DNA, 19 bp, Homo sapiens
tggcagcagtaggagtgtg

SEQ ID NO: 14897 - DNA, 21 bp, Homo sapiens
tggcagccactcagcccttcg

SEQ ID NO: 14898 - DNA, 18 bp, Homo sapiens
tggcagcgccatggagac

SEQ ID NO: 14899 - DNA, 17 bp, Homo sapiens
tggcagcggcggaaagt

SEQ ID NO: 14900 - DNA, 18 bp, Homo sapiens
tggcagcggcggaaagtt

SEQ ID NO: 14901 - DNA, 20 bp, Homo sapiens
tggcagcggcggaaagtttg

SEQ ID NO: 14902 - DNA, 17 bp, Homo sapiens
tggcagctgaaggctcg

SEQ ID NO: 14903 - DNA, 19 bp, Homo sapiens
tggcagctgccgggcggtc

SEQ ID NO: 14904 - DNA, 18 bp, Homo sapiens
tggcagctgctggagcgg

SEQ ID NO: 14905 - DNA, 22 bp, Homo sapiens
tggcagctggcggcattgaggc

SEQ ID NO: 14906 - DNA, 18 bp, Homo sapiens
tggcaggagctgtagcta

SEQ ID NO: 14907 - DNA, 19 bp, Homo sapiens
tggcaggagctgtagctac

SEQ ID NO: 14908 - DNA, 18 bp, Homo sapiens
tggcatctggagggacca

SEQ ID NO: 14909 - DNA, 18 bp, Homo sapiens
tggccaccggcggcggcg

SEQ ID NO: 14910 - DNA, 16 bp, Homo sapiens
tggccatttcgtctta

SEQ ID NO: 14911 - DNA, 18 bp, Homo sapiens
tggcccactcccaccgcc

SEQ ID NO: 14912 - DNA, 18 bp, Homo sapiens
tggcccagggctggcggc

SEQ ID NO: 14913 - DNA, 19 bp, Homo sapiens
tggccccatgcccggccgg

SEQ ID NO: 14914 - DNA, 18 bp, Homo sapiens
tggcccccacccttccac

SEQ ID NO: 14915 - DNA, 18 bp, Homo sapiens
tggcccggcgtgtagcgg

SEQ ID NO: 14916 - DNA, 18 bp, Homo sapiens
tggcccgtgtgcgcttcc

SEQ ID NO: 14917 - DNA, 18 bp, Homo sapiens
tggccctgaggcggccgc

SEQ ID NO: 14918 - DNA, 19 bp, Homo sapiens
tggccgagcgccgtgcgcc

SEQ ID NO: 14919 - DNA, 21 bp, Homo sapiens
tggccgatgcggtgatagcac

SEQ ID NO: 14920 - DNA, 19 bp, Homo sapiens
tggccgcacgccccggccc

SEQ ID NO: 14921 - DNA, 23 bp, Homo sapiens
tggccgcagccattttggtgcga

SEQ ID NO: 14922 - DNA, 22 bp, Homo sapiens
tggccgcccggcagccgccgaa

SEQ ID NO: 14923 - DNA, 18 bp, Homo sapiens
tggccgccctgcgtgtcc

SEQ ID NO: 14924 - DNA, 19 bp, Homo sapiens
tggccgccgcctaagctgc

SEQ ID NO: 14925 - DNA, 18 bp, Homo sapiens
tggccgctgtgtggttgc

SEQ ID NO: 14926 - DNA, 17 bp, Homo sapiens
tggccggacggagagac

SEQ ID NO: 14927 - DNA, 17 bp, Homo sapiens
tggccggagcagccgga

SEQ ID NO: 14928 - DNA, 18 bp, Homo sapiens
tggccggagccgagggcg

SEQ ID NO: 14929 - DNA, 18 bp, Homo sapiens
ctagaccgcggggtagtc

SEQ ID NO: 14930 - DNA, 19 bp, Homo sapiens
ctagacctggacaagtatg

SEQ ID NO: 14931 - DNA, 18 bp, Homo sapiens
ctagagcggacagggcga

SEQ ID NO: 14932 - DNA, 17 bp, Homo sapiens
ctagagctggagactag

SEQ ID NO: 14933 - DNA, 19 bp, Homo sapiens
ctagaggaaggccaagcag

SEQ ID NO: 14934 - DNA, 19 bp, Homo sapiens
ctagaggccgacgccagcc

SEQ ID NO: 14935 - DNA, 20 bp, Homo sapiens
ctagaggggcgacaggccag

SEQ ID NO: 14936 - DNA, 20 bp, Homo sapiens
ctagcactctgacctagcag

SEQ ID NO: 14937 - DNA, 20 bp, Homo sapiens
ctagcctgtggagacgggac

SEQ ID NO: 14938 - DNA, 18 bp, Homo sapiens
ctagcgcagttctcactg

SEQ ID NO: 14939 - DNA, 16 bp, Homo sapiens
ctagcgctacccgtgc

SEQ ID NO: 14940 - DNA, 18 bp, Homo sapiens
ctagctcccgccggctgg

SEQ ID NO: 14941 - DNA, 20 bp, Homo sapiens
ctagctctgaaggcatggcg

SEQ ID NO: 14942 - DNA, 16 bp, Homo sapiens
ctaggacgcacggggg

SEQ ID NO: 14943 - DNA, 18 bp, Homo sapiens
ctaggagataaaaaggta

SEQ ID NO: 14944 - DNA, 18 bp, Homo sapiens
ctaggcctttcggtttgc

SEQ ID NO: 14945 - DNA, 16 bp, Homo sapiens
ctaggcgcggatcgga

SEQ ID NO: 14946 - DNA, 18 bp, Homo sapiens
ctaggcggcggatctaag

SEQ ID NO: 14947 - DNA, 18 bp, Homo sapiens
ctaggcggctggaaacgg

SEQ ID NO: 14948 - DNA, 19 bp, Homo sapiens
ctaggctctctgaggaggc

SEQ ID NO: 14949 - DNA, 17 bp, Homo sapiens
ctagggagcgtgggatt

SEQ ID NO: 14950 - DNA, 16 bp, Homo sapiens
ctagggcggcggtagc

SEQ ID NO: 14951 - DNA, 18 bp, Homo sapiens
ctagggctagcggccatg

SEQ ID NO: 14952 - DNA, 16 bp, Homo sapiens
ctaggggctgctggga

SEQ ID NO: 14953 - DNA, 18 bp, Homo sapiens
ctaggggctgctgggaag

SEQ ID NO: 14954 - DNA, 19 bp, Homo sapiens
ctagggtgcagcgccaggt

SEQ ID NO: 14955 - DNA, 16 bp, Homo sapiens
ctaggtcgcggcgaca

SEQ ID NO: 14956 - DNA, 18 bp, Homo sapiens
ctaggtgagtgcggctgc

SEQ ID NO: 14957 - DNA, 16 bp, Homo sapiens
ctagtagtgcagcttc

SEQ ID NO: 14958 - DNA, 17 bp, Homo sapiens
ctagtagtgcagcttcg

SEQ ID NO: 14959 - DNA, 18 bp, Homo sapiens
ctagtcaggcgaagtttg

SEQ ID NO: 14960 - DNA, 21 bp, Homo sapiens
ctagtccaacatggcggcgcc

SEQ ID NO: 14961 - DNA, 21 bp, Homo sapiens
ctagtcgcggacgcaatggct

SEQ ID NO: 14962 - DNA, 16 bp, Homo sapiens
ctagtcggacaaagcc

SEQ ID NO: 14963 - DNA, 18 bp, Homo sapiens
ctagtcgttctgaagcgg

SEQ ID NO: 14964 - DNA, 20 bp, Homo sapiens
ctagtgagcgcggacggatg

SEQ ID NO: 14965 - DNA, 18 bp, Homo sapiens
ctagtggcgcgcggagga

SEQ ID NO: 14966 - DNA, 19 bp, Homo sapiens
ctagttagtatcggcctgt

SEQ ID NO: 14967 - DNA, 20 bp, Homo sapiens
ctagttggagccggagtcgg

SEQ ID NO: 14968 - DNA, 21 bp, Homo sapiens
ctataattttgaaccaacaga

SEQ ID NO: 14969 - DNA, 16 bp, Homo sapiens
ctataggctcggggag

SEQ ID NO: 14970 - DNA, 18 bp, Homo sapiens
ctatcagagaacggacag

SEQ ID NO: 14971 - DNA, 17 bp, Homo sapiens
ctatcaggaagattgtg

SEQ ID NO: 14972 - DNA, 19 bp, Homo sapiens
ctatcaggaagattgtgca

SEQ ID NO: 14973 - DNA, 21 bp, Homo sapiens
ctatccggctccatccaacct

SEQ ID NO: 14974 - DNA, 19 bp, Homo sapiens
ctatccggtcctcggctgc

SEQ ID NO: 14975 - DNA, 18 bp, Homo sapiens
ctatggagatacctaggc

SEQ ID NO: 14976 - DNA, 18 bp, Homo sapiens
ctatgggagtcccggcgt

SEQ ID NO: 14977 - DNA, 18 bp, Homo sapiens
ctatgggggaactgatgg

SEQ ID NO: 14978 - DNA, 20 bp, Homo sapiens
ctatgggggaactgatggcg

SEQ ID NO: 14979 - DNA, 18 bp, Homo sapiens
ctatgtctggacgtggca

SEQ ID NO: 14980 - DNA, 16 bp, Homo sapiens
ctatgtggcgcgtctg

SEQ ID NO: 14981 - DNA, 18 bp, Homo sapiens
ctcaaatgcagtcggctt

SEQ ID NO: 14982 - DNA, 18 bp, Homo sapiens
ctcaaccactgaccggga

SEQ ID NO: 14983 - DNA, 17 bp, Homo sapiens
ctcaactgcaaggacgc

SEQ ID NO: 14984 - DNA, 17 bp, Homo sapiens
ctcaagatggcggcgtg

SEQ ID NO: 14985 - DNA, 18 bp, Homo sapiens
ctcaagatggtaggagaa

SEQ ID NO: 14986 - DNA, 16 bp, Homo sapiens
tggccggcccgccgga

SEQ ID NO: 14987 - DNA, 19 bp, Homo sapiens
tggccggcgggcactgggg

SEQ ID NO: 14988 - DNA, 22 bp, Homo sapiens
tggccgggactttgcaggcagc

SEQ ID NO: 14989 - DNA, 21 bp, Homo sapiens
tggccgggcactttcaaaatg

SEQ ID NO: 14990 - DNA, 20 bp, Homo sapiens
tggccgggcagcacctcccg

SEQ ID NO: 14991 - DNA, 17 bp, Homo sapiens
tggccgggccagcgcag

SEQ ID NO: 14992 - DNA, 19 bp, Homo sapiens
tggccgggccctgtgccgg

SEQ ID NO: 14993 - DNA, 18 bp, Homo sapiens
tggccgggcgcgggtcgt

SEQ ID NO: 14994 - DNA, 19 bp, Homo sapiens
tggccgggcgtagacgcgg

SEQ ID NO: 14995 - DNA, 16 bp, Homo sapiens
tggccggggcgcgcgg

SEQ ID NO: 14996 - DNA, 22 bp, Homo sapiens
tggccggtgtgcgtccgcctgc

SEQ ID NO: 14997 - DNA, 18 bp, Homo sapiens
tggcctagagcggggccc

SEQ ID NO: 14998 - DNA, 22 bp, Homo sapiens
tggcctccttggaagtcagtcg

SEQ ID NO: 14999 - DNA, 18 bp, Homo sapiens
tggcctgactgaaggcgg

SEQ ID NO: 15000 - DNA, 17 bp, Homo sapiens
tggcctgcgggcggcca

SEQ ID NO: 15001 - DNA, 18 bp, Homo sapiens
tggcctggagggagacct

SEQ ID NO: 15002 - DNA, 22 bp, Homo sapiens
tggcctggctttcccggccggc

SEQ ID NO: 15003 - DNA, 24 bp, Homo sapiens
tggccttgctcccgctgtgcggga

SEQ ID NO: 15004 - DNA, 19 bp, Homo sapiens
tggccttggaagggatgag

SEQ ID NO: 15005 - DNA, 17 bp, Homo sapiens
tggcgaagcggctctgc

SEQ ID NO: 15006 - DNA, 20 bp, Homo sapiens
tggcgaagtccgggctgagg

SEQ ID NO: 15007 - DNA, 18 bp, Homo sapiens
tggcgacaaaatggctgc

SEQ ID NO: 15008 - DNA, 17 bp, Homo sapiens
tggcgacgcctcggccc

SEQ ID NO: 15009 - DNA, 18 bp, Homo sapiens
tggcgacggagggaggag

SEQ ID NO: 15010 - DNA, 19 bp, Homo sapiens
tggcgactgcggcgcatgg

SEQ ID NO: 15011 - DNA, 17 bp, Homo sapiens
tggcgagaaggctggcg

SEQ ID NO: 15012 - DNA, 19 bp, Homo sapiens
tggcgagaaggctggcgtt

SEQ ID NO: 15013 - DNA, 15 bp, Homo sapiens
tggcgagcgcctcgt

SEQ ID NO: 15014 - DNA, 19 bp, Homo sapiens
tggcgaggagcccgccccg

SEQ ID NO: 15015 - DNA, 18 bp, Homo sapiens
tggcgaggcagatcctgc

SEQ ID NO: 15016 - DNA, 18 bp, Homo sapiens
tggcgagtacacctgctc

SEQ ID NO: 15017 - DNA, 18 bp, Homo sapiens
tggcgagtagtggaaacg

SEQ ID NO: 15018 - DNA, 19 bp, Homo sapiens
tggcgagtagtggaaacgt

SEQ ID NO: 15019 - DNA, 20 bp, Homo sapiens
tggcgagtggcggcgccggc

SEQ ID NO: 15020 - DNA, 18 bp, Homo sapiens
tggcgatggcggtgaagc

SEQ ID NO: 15021 - DNA, 20 bp, Homo sapiens
tggcgcagcggcgacagtaa

SEQ ID NO: 15022 - DNA, 18 bp, Homo sapiens
tggcgcagctgtttcctc

SEQ ID NO: 15023 - DNA, 18 bp, Homo sapiens
tggcgccaagacgattgg

SEQ ID NO: 15024 - DNA, 19 bp, Homo sapiens
tggcgccagaattcggagc

SEQ ID NO: 15025 - DNA, 18 bp, Homo sapiens
tggcgccccgctggaccc

SEQ ID NO: 15026 - DNA, 18 bp, Homo sapiens
tggcgccggggagggatg

SEQ ID NO: 15027 - DNA, 18 bp, Homo sapiens
tggcgccgtctggggagc

SEQ ID NO: 15028 - DNA, 18 bp, Homo sapiens
tggcgcctggccgccgcg

SEQ ID NO: 15029 - DNA, 18 bp, Homo sapiens
tggcgcctttgtcctacg

SEQ ID NO: 15030 - DNA, 21 bp, Homo sapiens
tggcgccttttaagagataca

SEQ ID NO: 15031 - DNA, 19 bp, Homo sapiens
tggcgcgagcctgcgtttt

SEQ ID NO: 15032 - DNA, 24 bp, Homo sapiens
tggcgcgcggagctggcaccttgg

SEQ ID NO: 15033 - DNA, 16 bp, Homo sapiens
tggcgcgcgggtccgg

SEQ ID NO: 15034 - DNA, 17 bp, Homo sapiens
tggcgcggaaaacgaag

SEQ ID NO: 15035 - DNA, 19 bp, Homo sapiens
tggcgcggagcggagcggc

SEQ ID NO: 15036 - DNA, 19 bp, Homo sapiens
tggcgcggcgtggggcgcc

SEQ ID NO: 15037 - DNA, 18 bp, Homo sapiens
tggcgcggctgctcgccc

SEQ ID NO: 15038 - DNA, 17 bp, Homo sapiens
tggcgcgggtccgggca

SEQ ID NO: 15039 - DNA, 18 bp, Homo sapiens
tggcgcggttcaatacct

SEQ ID NO: 15040 - DNA, 18 bp, Homo sapiens
tggcgctgctgagagagg

SEQ ID NO: 15041 - DNA, 18 bp, Homo sapiens
tggcgctggctgtcttgc

SEQ ID NO: 15042 - DNA, 17 bp, Homo sapiens
tggcgctgggctcgggg

SEQ ID NO: 15043 - DNA, 18 bp, Homo sapiens
ctcaagtagcggacacgg

SEQ ID NO: 15044 - DNA, 18 bp, Homo sapiens
ctcaatatcgcgggacgg

SEQ ID NO: 15045 - DNA, 20 bp, Homo sapiens
ctcacaattgccacgggtac

SEQ ID NO: 15046 - DNA, 19 bp, Homo sapiens
ctcacagactcttacttgg

SEQ ID NO: 15047 - DNA, 22 bp, Homo sapiens
ctcacccggtcccggcgccgcc

SEQ ID NO: 15048 - DNA, 20 bp, Homo sapiens
ctcaccgtgtgtagttggca

SEQ ID NO: 15049 - DNA, 19 bp, Homo sapiens
ctcacctccctttctaact

SEQ ID NO: 15050 - DNA, 19 bp, Homo sapiens
ctcacgctgggctaggagc

SEQ ID NO: 15051 - DNA, 17 bp, Homo sapiens
ctcacgggcgcgcggac

SEQ ID NO: 15052 - DNA, 23 bp, Homo sapiens
ctcactatcctgaatgatcgcgg

SEQ ID NO: 15053 - DNA, 17 bp, Homo sapiens
ctcactcgcacaagtgg

SEQ ID NO: 15054 - DNA, 18 bp, Homo sapiens
ctcactgactataaaaga

SEQ ID NO: 15055 - DNA, 22 bp, Homo sapiens
ctcactggcccgggccggcgcg

SEQ ID NO: 15056 - DNA, 19 bp, Homo sapiens
ctcacttccctggagccgc

SEQ ID NO: 15057 - DNA, 18 bp, Homo sapiens
ctcacttccgcttccttc

SEQ ID NO: 15058 - DNA, 19 bp, Homo sapiens
ctcacttccgcttccttcc

SEQ ID NO: 15059 - DNA, 17 bp, Homo sapiens
ctcacttctaagtttgc

SEQ ID NO: 15060 - DNA, 17 bp, Homo sapiens
ctcagaagaaggacggg

SEQ ID NO: 15061 - DNA, 20 bp, Homo sapiens
ctcagaagaaggacgggaag

SEQ ID NO: 15062 - DNA, 23 bp, Homo sapiens
ctcagaagaaggacgggaagaag

SEQ ID NO: 15063 - DNA, 18 bp, Homo sapiens
ctcagaagtgcctcagca

SEQ ID NO: 15064 - DNA, 18 bp, Homo sapiens
ctcagagaggcttgaggt

SEQ ID NO: 15065 - DNA, 19 bp, Homo sapiens
ctcagaggccacgaggtcg

SEQ ID NO: 15066 - DNA, 18 bp, Homo sapiens
ctcagagtgtggtcaggc

SEQ ID NO: 15067 - DNA, 20 bp, Homo sapiens
ctcagagtgtggtcaggcgg

SEQ ID NO: 15068 - DNA, 16 bp, Homo sapiens
ctcagatcggtggacg

SEQ ID NO: 15069 - DNA, 18 bp, Homo sapiens
ctcagcaaccagtagcca

SEQ ID NO: 15070 - DNA, 18 bp, Homo sapiens
ctcagcagagactcgggc

SEQ ID NO: 15071 - DNA, 19 bp, Homo sapiens
ctcagcagagactcgggct

SEQ ID NO: 15072 - DNA, 18 bp, Homo sapiens
ctcagcagcaaacagctc

SEQ ID NO: 15073 - DNA, 17 bp, Homo sapiens
ctcagcagctgcgggag

SEQ ID NO: 15074 - DNA, 18 bp, Homo sapiens
ctcagcagctgcgggaga

SEQ ID NO: 15075 - DNA, 20 bp, Homo sapiens
ctcagccccctgcccctcgc

SEQ ID NO: 15076 - DNA, 19 bp, Homo sapiens
ctcagcctggaatcacccc

SEQ ID NO: 15077 - DNA, 16 bp, Homo sapiens
ctcagcggtgttggaa

SEQ ID NO: 15078 - DNA, 18 bp, Homo sapiens
ctcagcggtgttggaact

SEQ ID NO: 15079 - DNA, 18 bp, Homo sapiens
ctcagcttcgggtcctgc

SEQ ID NO: 15080 - DNA, 23 bp, Homo sapiens
ctcaggccccggctccctcctga

SEQ ID NO: 15081 - DNA, 18 bp, Homo sapiens
ctcaggcgaacgaacggg

SEQ ID NO: 15082 - DNA, 18 bp, Homo sapiens
ctcaggcggagcggcccg

SEQ ID NO: 15083 - DNA, 18 bp, Homo sapiens
ctcaggcggtggaggaaa

SEQ ID NO: 15084 - DNA, 17 bp, Homo sapiens
ctcaggcttgggatccc

SEQ ID NO: 15085 - DNA, 19 bp, Homo sapiens
ctcagggcggctgcgcaga

SEQ ID NO: 15086 - DNA, 19 bp, Homo sapiens
ctcaggtcgccgctgcgaa

SEQ ID NO: 15087 - DNA, 16 bp, Homo sapiens
ctcaggtttttgagaa

SEQ ID NO: 15088 - DNA, 24 bp, Homo sapiens
ctcagtctctgagcagccattgaa

SEQ ID NO: 15089 - DNA, 20 bp, Homo sapiens
ctcagtctcttggtctgtgg

SEQ ID NO: 15090 - DNA, 18 bp, Homo sapiens
ctcagtgacagatggaca

SEQ ID NO: 15091 - DNA, 20 bp, Homo sapiens
ctcagtgcacaatggctaga

SEQ ID NO: 15092 - DNA, 21 bp, Homo sapiens
ctcagtgcgcatccggacgta

SEQ ID NO: 15093 - DNA, 17 bp, Homo sapiens
ctcagtggaccggaatc

SEQ ID NO: 15094 - DNA, 18 bp, Homo sapiens
ctcagttccgccatggcc

SEQ ID NO: 15095 - DNA, 22 bp, Homo sapiens
ctcatactagggacgggaagtc

SEQ ID NO: 15096 - DNA, 18 bp, Homo sapiens
ctcatcggagcgtgtgga

SEQ ID NO: 15097 - DNA, 19 bp, Homo sapiens
ctcatctaccagcgctctg

SEQ ID NO: 15098 - DNA, 20 bp, Homo sapiens
ctcatggagaagccccggag

SEQ ID NO: 15099 - DNA, 22 bp, Homo sapiens
ctcattgaattagaacagcact

SEQ ID NO: 15100 - DNA, 19 bp, Homo sapiens
tggcgcttgacggaccaga

SEQ ID NO: 15101 - DNA, 18 bp, Homo sapiens
tggcgcttgtcccctgcc

SEQ ID NO: 15102 - DNA, 17 bp, Homo sapiens
tggcggaagaggttcgg

SEQ ID NO: 15103 - DNA, 18 bp, Homo sapiens
tggcggaagcggagtgag

SEQ ID NO: 15104 - DNA, 20 bp, Homo sapiens
tggcggaagcggagtgagtg

SEQ ID NO: 15105 - DNA, 17 bp, Homo sapiens
tggcggaaggagaagat

SEQ ID NO: 15106 - DNA, 18 bp, Homo sapiens
tggcggaaggagaagatg

SEQ ID NO: 15107 - DNA, 20 bp, Homo sapiens
tggcggaaggagaagatgtg

SEQ ID NO: 15108 - DNA, 18 bp, Homo sapiens
tggcggaaggcggagcgg

SEQ ID NO: 15109 - DNA, 17 bp, Homo sapiens
tggcggacggaaaggga

SEQ ID NO: 15110 - DNA, 19 bp, Homo sapiens
tggcggacggcgtggacca

SEQ ID NO: 15111 - DNA, 18 bp, Homo sapiens
tggcggagaacagcggtc

SEQ ID NO: 15112 - DNA, 20 bp, Homo sapiens
tggcggagcaagagtgagtg

SEQ ID NO: 15113 - DNA, 18 bp, Homo sapiens
tggcggagcagagacagg

SEQ ID NO: 15114 - DNA, 18 bp, Homo sapiens
tggcggagcccgggaggc

SEQ ID NO: 15115 - DNA, 18 bp, Homo sapiens
tggcggaggtgcaggtat

SEQ ID NO: 15116 - DNA, 20 bp, Homo sapiens
tggcggatctgtagtagtta

SEQ ID NO: 15117 - DNA, 19 bp, Homo sapiens
tggcggcagcgcgccgcgg

SEQ ID NO: 15118 - DNA, 18 bp, Homo sapiens
tggcggcagctggaggtg

SEQ ID NO: 15119 - DNA, 19 bp, Homo sapiens
tggcggcaggcggcctggt

SEQ ID NO: 15120 - DNA, 19 bp, Homo sapiens
tggcggcagggaccagcag

SEQ ID NO: 15121 - DNA, 21 bp, Homo sapiens
tggcggcagtggtggaggtgg

SEQ ID NO: 15122 - DNA, 15 bp, Homo sapiens
tggcggccgcctaag

SEQ ID NO: 15123 - DNA, 17 bp, Homo sapiens
tggcggccgttgaaaaa

SEQ ID NO: 15124 - DNA, 17 bp, Homo sapiens
tggcggcctaaagaagg

SEQ ID NO: 15125 - DNA, 21 bp, Homo sapiens
tggcggcgactctgggacccc

SEQ ID NO: 15126 - DNA, 19 bp, Homo sapiens
tggcggcgagaagatggcg

SEQ ID NO: 15127 - DNA, 20 bp, Homo sapiens
tggcggcgagcactggctac

SEQ ID NO: 15128 - DNA, 18 bp, Homo sapiens
tggcggcgaggacgagtc

SEQ ID NO: 15129 - DNA, 19 bp, Homo sapiens
tggcggcgcagtctcggta

SEQ ID NO: 15130 - DNA, 18 bp, Homo sapiens
tggcggcgcccagaggct

SEQ ID NO: 15131 - DNA, 19 bp, Homo sapiens
tggcggcgcccagaggctg

SEQ ID NO: 15132 - DNA, 20 bp, Homo sapiens
tggcggcgcccagaggctgc

SEQ ID NO: 15133 - DNA, 18 bp, Homo sapiens
tggcggcgcccagcagag

SEQ ID NO: 15134 - DNA, 23 bp, Homo sapiens
tggcggcgccggaggcggaggtt

SEQ ID NO: 15135 - DNA, 18 bp, Homo sapiens
tggcggcgcctttgtctc

SEQ ID NO: 15136 - DNA, 18 bp, Homo sapiens
tggcggcgcggacagcgt

SEQ ID NO: 15137 - DNA, 21 bp, Homo sapiens
tggcggcgctaggggaacccg

SEQ ID NO: 15138 - DNA, 18 bp, Homo sapiens
tggcggcggaggcggccg

SEQ ID NO: 15139 - DNA, 19 bp, Homo sapiens
tggcggcggcagccgaggg

SEQ ID NO: 15140 - DNA, 18 bp, Homo sapiens
tggcggcggcagtcggga

SEQ ID NO: 15141 - DNA, 18 bp, Homo sapiens
tggcggcggctgcctcgc

SEQ ID NO: 15142 - DNA, 17 bp, Homo sapiens
tggcggcggctggttgc

SEQ ID NO: 15143 - DNA, 19 bp, Homo sapiens
tggcggcgggttgctgcgg

SEQ ID NO: 15144 - DNA, 18 bp, Homo sapiens
tggcggcggtagcggagg

SEQ ID NO: 15145 - DNA, 19 bp, Homo sapiens
tggcggcggtagcggcagt

SEQ ID NO: 15146 - DNA, 20 bp, Homo sapiens
tggcggcggttttggctgtg

SEQ ID NO: 15147 - DNA, 22 bp, Homo sapiens
tggcggcggttttggctgtgtg

SEQ ID NO: 15148 - DNA, 18 bp, Homo sapiens
tggcggcgtctcggactg

SEQ ID NO: 15149 - DNA, 21 bp, Homo sapiens
tggcggcgtctgcgtctgcag

SEQ ID NO: 15150 - DNA, 18 bp, Homo sapiens
tggcggctctgaagagtt

SEQ ID NO: 15151 - DNA, 17 bp, Homo sapiens
tggcggctctgcagagt

SEQ ID NO: 15152 - DNA, 19 bp, Homo sapiens
tggcggctctgcagagtcg

SEQ ID NO: 15153 - DNA, 21 bp, Homo sapiens
tggcggctctgcagagtcgag

SEQ ID NO: 15154 - DNA, 19 bp, Homo sapiens
tggcggctgcaggtccgag

SEQ ID NO: 15155 - DNA, 18 bp, Homo sapiens
tggcggctgcgtcggggt

SEQ ID NO: 15156 - DNA, 17 bp, Homo sapiens
tggcggctggaagtgga

SEQ ID NO: 15157 - DNA, 18 bp, Homo sapiens
ctcatttcctcccagcct

SEQ ID NO: 15158 - DNA, 17 bp, Homo sapiens
ctccaaagctcggggag

SEQ ID NO: 15159 - DNA, 20 bp, Homo sapiens
ctccaaaggggttggactaa

SEQ ID NO: 15160 - DNA, 18 bp, Homo sapiens
ctccaactgggagagctg

SEQ ID NO: 15161 - DNA, 18 bp, Homo sapiens
ctccaacttccgggcctt

SEQ ID NO: 15162 - DNA, 22 bp, Homo sapiens
ctccaccctggctggaggaact

SEQ ID NO: 15163 - DNA, 17 bp, Homo sapiens
ctccagagactgacgag

SEQ ID NO: 15164 - DNA, 19 bp, Homo sapiens
ctccagagactgacgagtg

SEQ ID NO: 15165 - DNA, 21 bp, Homo sapiens
ctccagagcctccgggtctgg

SEQ ID NO: 15166 - DNA, 18 bp, Homo sapiens
ctccagcgacctcagcca

SEQ ID NO: 15167 - DNA, 22 bp, Homo sapiens
ctccagcgggagaacgataatg

SEQ ID NO: 15168 - DNA, 19 bp, Homo sapiens
ctccagctgaggtttctag

SEQ ID NO: 15169 - DNA, 18 bp, Homo sapiens
ctccagctgcattgcgtc

SEQ ID NO: 15170 - DNA, 21 bp, Homo sapiens
ctccaggcggatcgtggcatg

SEQ ID NO: 15171 - DNA, 19 bp, Homo sapiens
ctccagggaggcagggccc

SEQ ID NO: 15172 - DNA, 18 bp, Homo sapiens
ctccaggtccgggactgc

SEQ ID NO: 15173 - DNA, 20 bp, Homo sapiens
ctccaggtcctctgagttaa

SEQ ID NO: 15174 - DNA, 18 bp, Homo sapiens
ctccatgccaggactgag

SEQ ID NO: 15175 - DNA, 17 bp, Homo sapiens
ctccatgggacaaggag

SEQ ID NO: 15176 - DNA, 18 bp, Homo sapiens
ctcccaagatggtggcgc

SEQ ID NO: 15177 - DNA, 18 bp, Homo sapiens
ctcccaattcggaagcta

SEQ ID NO: 15178 - DNA, 16 bp, Homo sapiens
ctcccacaccactgcc

SEQ ID NO: 15179 - DNA, 17 bp, Homo sapiens
ctccccccgcgcagccc

SEQ ID NO: 15180 - DNA, 21 bp, Homo sapiens
ctcccccggactccttggtag

SEQ ID NO: 15181 - DNA, 22 bp, Homo sapiens
ctccccctcccggccaagatgt

SEQ ID NO: 15182 - DNA, 18 bp, Homo sapiens
ctccccctgttccgcgtc

SEQ ID NO: 15183 - DNA, 17 bp, Homo sapiens
ctccccgcccccggagc

SEQ ID NO: 15184 - DNA, 22 bp, Homo sapiens
ctcccgattgtgcccgaaggaa

SEQ ID NO: 15185 - DNA, 21 bp, Homo sapiens
ctcccgccgccgcccgccctc

SEQ ID NO: 15186 - DNA, 18 bp, Homo sapiens
ctcccgccgccgccgccg

SEQ ID NO: 15187 - DNA, 19 bp, Homo sapiens
ctcccgctcctaccctgca

SEQ ID NO: 15188 - DNA, 18 bp, Homo sapiens
ctcccggatgtgtgcctg

SEQ ID NO: 15189 - DNA, 18 bp, Homo sapiens
ctcccggggaaccgcgtg

SEQ ID NO: 15190 - DNA, 18 bp, Homo sapiens
ctcccgggtcacgtgaca

SEQ ID NO: 15191 - DNA, 18 bp, Homo sapiens
ctcccggtccctgaaact

SEQ ID NO: 15192 - DNA, 18 bp, Homo sapiens
ctccctccttgcagagcc

SEQ ID NO: 15193 - DNA, 17 bp, Homo sapiens
ctccctctcccagccaa

SEQ ID NO: 15194 - DNA, 18 bp, Homo sapiens
ctccctgccagcggagtg

SEQ ID NO: 15195 - DNA, 18 bp, Homo sapiens
ctccgaagtggcagcagc

SEQ ID NO: 15196 - DNA, 19 bp, Homo sapiens
ctccgagaggcccaaggtg

SEQ ID NO: 15197 - DNA, 18 bp, Homo sapiens
ctccgagcgcaaggacag

SEQ ID NO: 15198 - DNA, 16 bp, Homo sapiens
ctccgagcgtgagtcc

SEQ ID NO: 15199 - DNA, 18 bp, Homo sapiens
ctccgcaacccccgcccc

SEQ ID NO: 15200 - DNA, 18 bp, Homo sapiens
ctccgcagggcagcagtc

SEQ ID NO: 15201 - DNA, 18 bp, Homo sapiens
ctccgcattgcagactgc

SEQ ID NO: 15202 - DNA, 21 bp, Homo sapiens
ctccgccaggcaggagacact

SEQ ID NO: 15203 - DNA, 23 bp, Homo sapiens
ctccgccaggcaggagacactgt

SEQ ID NO: 15204 - DNA, 18 bp, Homo sapiens
ctccgcgaggggtgcgca

SEQ ID NO: 15205 - DNA, 20 bp, Homo sapiens
ctccgcggaccggcactagg

SEQ ID NO: 15206 - DNA, 18 bp, Homo sapiens
ctccgcggaggtagccgt

SEQ ID NO: 15207 - DNA, 18 bp, Homo sapiens
ctccgctgggggacggga

SEQ ID NO: 15208 - DNA, 18 bp, Homo sapiens
ctccggaccggtttcgcc

SEQ ID NO: 15209 - DNA, 18 bp, Homo sapiens
ctccggaggtaggggcaa

SEQ ID NO: 15210 - DNA, 17 bp, Homo sapiens
ctccggcccgctagacc

SEQ ID NO: 15211 - DNA, 18 bp, Homo sapiens
ctccggcctccttcgaga

SEQ ID NO: 15212 - DNA, 20 bp, Homo sapiens
ctccggcgcagtgttgggac

SEQ ID NO: 15213 - DNA, 22 bp, Homo sapiens
ctccggcttctccatagagggc

SEQ ID NO: 15214 - DNA, 18 bp, Homo sapiens
tggcgggagggcgggcta

SEQ ID NO: 15215 - DNA, 18 bp, Homo sapiens
tggcgggcgtcagcgcgg

SEQ ID NO: 15216 - DNA, 18 bp, Homo sapiens
tggcgggcgttaaaggta

SEQ ID NO: 15217 - DNA, 16 bp, Homo sapiens
tggcgggctctggaag

SEQ ID NO: 15218 - DNA, 21 bp, Homo sapiens
tggcgggctgctgcgccgcgc

SEQ ID NO: 15219 - DNA, 19 bp, Homo sapiens
tggcggggatggcgctggc

SEQ ID NO: 15220 - DNA, 17 bp, Homo sapiens
tggcgggtgggcgctgc

SEQ ID NO: 15221 - DNA, 18 bp, Homo sapiens
tggcggtacgcgcgttga

SEQ ID NO: 15222 - DNA, 18 bp, Homo sapiens
tggcggtgcggaagaagg

SEQ ID NO: 15223 - DNA, 19 bp, Homo sapiens
tggcggtgctcggcgcggc

SEQ ID NO: 15224 - DNA, 16 bp, Homo sapiens
tggcggtggagtcgcg

SEQ ID NO: 15225 - DNA, 18 bp, Homo sapiens
tggcggtgtgcatcgcgg

SEQ ID NO: 15226 - DNA, 20 bp, Homo sapiens
tggcggttccggccgggcag

SEQ ID NO: 15227 - DNA, 18 bp, Homo sapiens
tggcggttccgttaggtc

SEQ ID NO: 15228 - DNA, 18 bp, Homo sapiens
tggcgtacccaaaatgca

SEQ ID NO: 15229 - DNA, 19 bp, Homo sapiens
tggcgtagaaagtaatgac

SEQ ID NO: 15230 - DNA, 18 bp, Homo sapiens
tggcgtagacgagttaag

SEQ ID NO: 15231 - DNA, 17 bp, Homo sapiens
tggcgtcgaagataggt

SEQ ID NO: 15232 - DNA, 17 bp, Homo sapiens
tggcgtcgctggcgccg

SEQ ID NO: 15233 - DNA, 21 bp, Homo sapiens
tggcgtcgtaacgcctcgggg

SEQ ID NO: 15234 - DNA, 23 bp, Homo sapiens
tggcgtgcggctttcgccgcgct

SEQ ID NO: 15235 - DNA, 16 bp, Homo sapiens
tggcgttctgattcgc

SEQ ID NO: 15236 - DNA, 19 bp, Homo sapiens
tggcgttctggtgtcagcg

SEQ ID NO: 15237 - DNA, 18 bp, Homo sapiens
tggcgttggtgggaagcg

SEQ ID NO: 15238 - DNA, 18 bp, Homo sapiens
tggctagctcagggcttc

SEQ ID NO: 15239 - DNA, 17 bp, Homo sapiens
tggctagctgcgtgggt

SEQ ID NO: 15240 - DNA, 20 bp, Homo sapiens
tggctagtaggagagactgg

SEQ ID NO: 15241 - DNA, 17 bp, Homo sapiens
tggctatcttgggggag

SEQ ID NO: 15242 - DNA, 20 bp, Homo sapiens
tggctcagcagcaaacagct

SEQ ID NO: 15243 - DNA, 18 bp, Homo sapiens
tggctcagtgagtagccg

SEQ ID NO: 15244 - DNA, 18 bp, Homo sapiens
tggctccagcgacctcag

SEQ ID NO: 15245 - DNA, 21 bp, Homo sapiens
tggctccagcgacctcagcca

SEQ ID NO: 15246 - DNA, 20 bp, Homo sapiens
tggctcccggaatatggagc

SEQ ID NO: 15247 - DNA, 18 bp, Homo sapiens
tggctccgcgtgaggcct

SEQ ID NO: 15248 - DNA, 20 bp, Homo sapiens
tggctcggagcagcagcctc

SEQ ID NO: 15249 - DNA, 18 bp, Homo sapiens
tggctgaaggaagccgag

SEQ ID NO: 15250 - DNA, 18 bp, Homo sapiens
tggctgagcaggaaccgc

SEQ ID NO: 15251 - DNA, 20 bp, Homo sapiens
tggctgcccttcccgccagc

SEQ ID NO: 15252 - DNA, 18 bp, Homo sapiens
tggctgcgagtacctcca

SEQ ID NO: 15253 - DNA, 16 bp, Homo sapiens
tggctgcgcggccgat

SEQ ID NO: 15254 - DNA, 20 bp, Homo sapiens
tggctgcgctgagagctcta

SEQ ID NO: 15255 - DNA, 20 bp, Homo sapiens
tggctgcggcggtctcgctc

SEQ ID NO: 15256 - DNA, 21 bp, Homo sapiens
tggctgctcctggcgagcgac

SEQ ID NO: 15257 - DNA, 19 bp, Homo sapiens
tggctggagtccgggcaga

SEQ ID NO: 15258 - DNA, 20 bp, Homo sapiens
tggctggcaggtgtcgctaa

SEQ ID NO: 15259 - DNA, 18 bp, Homo sapiens
tggctggccggtgtatgt

SEQ ID NO: 15260 - DNA, 20 bp, Homo sapiens
tggctggcggttccgttagg

SEQ ID NO: 15261 - DNA, 17 bp, Homo sapiens
tggctgggcatgttccg

SEQ ID NO: 15262 - DNA, 18 bp, Homo sapiens
tggctggtaagcaggccg

SEQ ID NO: 15263 - DNA, 19 bp, Homo sapiens
tggctggttctgcggcgtg

SEQ ID NO: 15264 - DNA, 20 bp, Homo sapiens
tggctgtagcagacgcgagg

SEQ ID NO: 15265 - DNA, 17 bp, Homo sapiens
tggctgtctgaagatag

SEQ ID NO: 15266 - DNA, 18 bp, Homo sapiens
tggctgtctgaagataga

SEQ ID NO: 15267 - DNA, 19 bp, Homo sapiens
tggctgtctgaagatagat

SEQ ID NO: 15268 - DNA, 18 bp, Homo sapiens
tggcttacagacgctgcc

SEQ ID NO: 15269 - DNA, 18 bp, Homo sapiens
tggcttcaggaagaggag

SEQ ID NO: 15270 - DNA, 20 bp, Homo sapiens
tggcttgagcgggaccggag

SEQ ID NO: 15271 - DNA, 17 bp, Homo sapiens
ctccgggtgtggaaggc

SEQ ID NO: 15272 - DNA, 20 bp, Homo sapiens
ctccgggtttggcaacgagg

SEQ ID NO: 15273 - DNA, 18 bp, Homo sapiens
ctcctaccccacctcctc

SEQ ID NO: 15274 - DNA, 19 bp, Homo sapiens
ctcctcctcccatccagcc

SEQ ID NO: 15275 - DNA, 23 bp, Homo sapiens
ctcctcctgtcccgcagtcggcg

SEQ ID NO: 15276 - DNA, 18 bp, Homo sapiens
ctcctcgggctccagcgg

SEQ ID NO: 15277 - DNA, 18 bp, Homo sapiens
ctcctcttgctccctcgg

SEQ ID NO: 15278 - DNA, 23 bp, Homo sapiens
ctcctgaagcagcagttatggag

SEQ ID NO: 15279 - DNA, 19 bp, Homo sapiens
ctcctgcagggcagagcgc

SEQ ID NO: 15280 - DNA, 17 bp, Homo sapiens
ctcctgcgcggcagctg

SEQ ID NO: 15281 - DNA, 21 bp, Homo sapiens
ctcctgcggatgccattatga

SEQ ID NO: 15282 - DNA, 18 bp, Homo sapiens
ctcctgggtcagacggtg

SEQ ID NO: 15283 - DNA, 18 bp, Homo sapiens
ctcctgtcggcggcgccc

SEQ ID NO: 15284 - DNA, 19 bp, Homo sapiens
ctcctgtgtgtaggaggga

SEQ ID NO: 15285 - DNA, 17 bp, Homo sapiens
ctcctgttgcaatggcg

SEQ ID NO: 15286 - DNA, 18 bp, Homo sapiens
ctccttcctgcgcgcgcg

SEQ ID NO: 15287 - DNA, 16 bp, Homo sapiens
ctccttttggcgccct

SEQ ID NO: 15288 - DNA, 17 bp, Homo sapiens
ctcgaaccagtggagcg

SEQ ID NO: 15289 - DNA, 18 bp, Homo sapiens
ctcgaaccagtggagcgc

SEQ ID NO: 15290 - DNA, 20 bp, Homo sapiens
ctcgaaccagtggagcgcac

SEQ ID NO: 15291 - DNA, 20 bp, Homo sapiens
ctcgaacgagtgtgggcgcg

SEQ ID NO: 15292 - DNA, 24 bp, Homo sapiens
ctcgaagcggatggcttttgcctg

SEQ ID NO: 15293 - DNA, 22 bp, Homo sapiens
ctcgacgaggcggagccgcgag

SEQ ID NO: 15294 - DNA, 19 bp, Homo sapiens
ctcgacgtggggcggccag

SEQ ID NO: 15295 - DNA, 18 bp, Homo sapiens
ctcgactgtgaagcgggc

SEQ ID NO: 15296 - DNA, 21 bp, Homo sapiens
ctcgactgtgaagcgggccgg

SEQ ID NO: 15297 - DNA, 21 bp, Homo sapiens
ctcgacttcggagaggcagcg

SEQ ID NO: 15298 - DNA, 18 bp, Homo sapiens
ctcgagacgcagccgccg

SEQ ID NO: 15299 - DNA, 17 bp, Homo sapiens
ctcgagcctccgcccgc

SEQ ID NO: 15300 - DNA, 19 bp, Homo sapiens
ctcgaggaggccggagccc

SEQ ID NO: 15301 - DNA, 19 bp, Homo sapiens
ctcgatctcgccgccaact

SEQ ID NO: 15302 - DNA, 17 bp, Homo sapiens
ctcgatcttgggaccca

SEQ ID NO: 15303 - DNA, 18 bp, Homo sapiens
ctcgatgaccacgggctg

SEQ ID NO: 15304 - DNA, 18 bp, Homo sapiens
ctcgcacgccttcctgcc

SEQ ID NO: 15305 - DNA, 18 bp, Homo sapiens
ctcgcagagctgggctgg

SEQ ID NO: 15306 - DNA, 19 bp, Homo sapiens
ctcgcagccgtcatggcag

SEQ ID NO: 15307 - DNA, 19 bp, Homo sapiens
ctcgcaggagccgagggac

SEQ ID NO: 15308 - DNA, 18 bp, Homo sapiens
ctcgcaggcagggctggg

SEQ ID NO: 15309 - DNA, 18 bp, Homo sapiens
ctcgcaggccgtaggagg

SEQ ID NO: 15310 - DNA, 18 bp, Homo sapiens
ctcgcagtcgtggactcg

SEQ ID NO: 15311 - DNA, 23 bp, Homo sapiens
ctcgcagtcgtggactcgtgcag

SEQ ID NO: 15312 - DNA, 18 bp, Homo sapiens
ctcgcagtggtttgtttg

SEQ ID NO: 15313 - DNA, 21 bp, Homo sapiens
ctcgcattgttcgggcgactc

SEQ ID NO: 15314 - DNA, 21 bp, Homo sapiens
ctcgccatggacgcggacgac

SEQ ID NO: 15315 - DNA, 19 bp, Homo sapiens
ctcgcccaactcccagaca

SEQ ID NO: 15316 - DNA, 18 bp, Homo sapiens
ctcgcccaggctgccaga

SEQ ID NO: 15317 - DNA, 18 bp, Homo sapiens
ctcgccccggccacggcg

SEQ ID NO: 15318 - DNA, 17 bp, Homo sapiens
ctcgccctgcgccctcg

SEQ ID NO: 15319 - DNA, 18 bp, Homo sapiens
ctcgccgcggactcaaga

SEQ ID NO: 15320 - DNA, 22 bp, Homo sapiens
ctcgccgcggactcaagatggc

SEQ ID NO: 15321 - DNA, 19 bp, Homo sapiens
ctcgccgggctctgaggcg

SEQ ID NO: 15322 - DNA, 20 bp, Homo sapiens
ctcgccggtggctgtccaag

SEQ ID NO: 15323 - DNA, 17 bp, Homo sapiens
ctcgccgtctgccgaca

SEQ ID NO: 15324 - DNA, 18 bp, Homo sapiens
ctcgcctggcgctaaatt

SEQ ID NO: 15325 - DNA, 18 bp, Homo sapiens
ctcgcgacgagccattga

SEQ ID NO: 15326 - DNA, 18 bp, Homo sapiens
ctcgcgagggtaggtgcg

SEQ ID NO: 15327 - DNA, 21 bp, Homo sapiens
ctcgcgatggagggaggagga

SEQ ID NO: 15328 - DNA, 18 bp, Homo sapiens
tggcttttggctggcgga

SEQ ID NO: 15329 - DNA, 18 bp, Homo sapiens
tgggaacggaagtcgctg

SEQ ID NO: 15330 - DNA, 18 bp, Homo sapiens
tgggaactacagctctcc

SEQ ID NO: 15331 - DNA, 22 bp, Homo sapiens
tgggaaggaggctctagatggc

SEQ ID NO: 15332 - DNA, 19 bp, Homo sapiens
tgggaagttgcgtagacag

SEQ ID NO: 15333 - DNA, 18 bp, Homo sapiens
tgggaatggctgtgcctg

SEQ ID NO: 15334 - DNA, 21 bp, Homo sapiens
tgggacccaccgcgggtagcg

SEQ ID NO: 15335 - DNA, 18 bp, Homo sapiens
tgggacctagctcgggac

SEQ ID NO: 15336 - DNA, 17 bp, Homo sapiens
tgggaccttgagagcgg

SEQ ID NO: 15337 - DNA, 18 bp, Homo sapiens
tgggaccttgagagcggc

SEQ ID NO: 15338 - DNA, 18 bp, Homo sapiens
tgggacgggtctgggcgg

SEQ ID NO: 15339 - DNA, 19 bp, Homo sapiens
tgggacgtcttggttcttg

SEQ ID NO: 15340 - DNA, 17 bp, Homo sapiens
tgggacgtggtggtagc

SEQ ID NO: 15341 - DNA, 20 bp, Homo sapiens
tgggactcgggtgggcgagg

SEQ ID NO: 15342 - DNA, 18 bp, Homo sapiens
tgggactgcagaggcgcg

SEQ ID NO: 15343 - DNA, 17 bp, Homo sapiens
tgggactggggcggaac

SEQ ID NO: 15344 - DNA, 20 bp, Homo sapiens
tgggagagaggctaggcctc

SEQ ID NO: 15345 - DNA, 19 bp, Homo sapiens
tgggagagttctacgaggg

SEQ ID NO: 15346 - DNA, 18 bp, Homo sapiens
tgggagcaacgcgactga

SEQ ID NO: 15347 - DNA, 20 bp, Homo sapiens
tgggagcaacgcgactgacc

SEQ ID NO: 15348 - DNA, 18 bp, Homo sapiens
tgggagcgagcgcttctg

SEQ ID NO: 15349 - DNA, 23 bp, Homo sapiens
tgggagcgcgcgttccgacggca

SEQ ID NO: 15350 - DNA, 18 bp, Homo sapiens
tgggagcgggaagactct

SEQ ID NO: 15351 - DNA, 19 bp, Homo sapiens
tgggagcgggctccgcagc

SEQ ID NO: 15352 - DNA, 19 bp, Homo sapiens
tgggaggagactggagccc

SEQ ID NO: 15353 - DNA, 20 bp, Homo sapiens
tgggaggaggacgaggagga

SEQ ID NO: 15354 - DNA, 22 bp, Homo sapiens
tgggagtccccggaccggagca

SEQ ID NO: 15355 - DNA, 19 bp, Homo sapiens
tgggagtcggagcgaggcc

SEQ ID NO: 15356 - DNA, 18 bp, Homo sapiens
tgggagtgtcgtggacgc

SEQ ID NO: 15357 - DNA, 20 bp, Homo sapiens
tgggagtgtcgtggacgccg

SEQ ID NO: 15358 - DNA, 18 bp, Homo sapiens
tgggatcatggcggagaa

SEQ ID NO: 15359 - DNA, 18 bp, Homo sapiens
tgggatgactatggagac

SEQ ID NO: 15360 - DNA, 18 bp, Homo sapiens
tgggatggcggctggagg

SEQ ID NO: 15361 - DNA, 18 bp, Homo sapiens
tgggcaagcttcgccatg

SEQ ID NO: 15362 - DNA, 18 bp, Homo sapiens
tgggcatcccggcatctg

SEQ ID NO: 15363 - DNA, 18 bp, Homo sapiens
tgggcccagtaggaagag

SEQ ID NO: 15364 - DNA, 19 bp, Homo sapiens
tgggcccatgcaggacgcg

SEQ ID NO: 15365 - DNA, 20 bp, Homo sapiens
tgggcccatgcaggacgcgg

SEQ ID NO: 15366 - DNA, 17 bp, Homo sapiens
tgggcccgactccgctc

SEQ ID NO: 15367 - DNA, 17 bp, Homo sapiens
tgggcccggccgggtcg

SEQ ID NO: 15368 - DNA, 16 bp, Homo sapiens
tgggccctacaactgc

SEQ ID NO: 15369 - DNA, 18 bp, Homo sapiens
tgggccgccaaggcaaga

SEQ ID NO: 15370 - DNA, 23 bp, Homo sapiens
tgggccgcccgtcgttccccggc

SEQ ID NO: 15371 - DNA, 18 bp, Homo sapiens
tgggccggggcaccagtc

SEQ ID NO: 15372 - DNA, 18 bp, Homo sapiens
tgggccgtccccattctt

SEQ ID NO: 15373 - DNA, 18 bp, Homo sapiens
tgggcgaactcggggcag

SEQ ID NO: 15374 - DNA, 22 bp, Homo sapiens
tgggcgacggggcgggcttttg

SEQ ID NO: 15375 - DNA, 16 bp, Homo sapiens
tgggcgcgccgctctc

SEQ ID NO: 15376 - DNA, 24 bp, Homo sapiens
tgggcgcggccgtcccgctgccgc

SEQ ID NO: 15377 - DNA, 19 bp, Homo sapiens
tgggcgctcagttttcggg

SEQ ID NO: 15378 - DNA, 19 bp, Homo sapiens
tgggcggcagctgcgtctc

SEQ ID NO: 15379 - DNA, 21 bp, Homo sapiens
tgggcggccgcaccatggact

SEQ ID NO: 15380 - DNA, 18 bp, Homo sapiens
tgggcggtgctggttttt

SEQ ID NO: 15381 - DNA, 22 bp, Homo sapiens
tgggcggtggggtgcgggtgcc

SEQ ID NO: 15382 - DNA, 18 bp, Homo sapiens
tgggctacggctgaccgt

SEQ ID NO: 15383 - DNA, 18 bp, Homo sapiens
tgggctcggggtgactac

SEQ ID NO: 15384 - DNA, 22 bp, Homo sapiens
tgggctgcgtcaggctgagccc

SEQ ID NO: 15385 - DNA, 20 bp, Homo sapiens
ctcgcgcagggggtgtgcga

SEQ ID NO: 15386 - DNA, 18 bp, Homo sapiens
ctcgcgcctgcgccgtgg

SEQ ID NO: 15387 - DNA, 18 bp, Homo sapiens
ctcgcgcgtgctgatgat

SEQ ID NO: 15388 - DNA, 18 bp, Homo sapiens
ctcgcgctgcaggcaggg

SEQ ID NO: 15389 - DNA, 19 bp, Homo sapiens
ctcgcggatgctgctctgc

SEQ ID NO: 15390 - DNA, 19 bp, Homo sapiens
ctcgcggcattggagtcaa

SEQ ID NO: 15391 - DNA, 19 bp, Homo sapiens
ctcgcgggaaccgcaccaa

SEQ ID NO: 15392 - DNA, 20 bp, Homo sapiens
ctcgcgtggtcatggaggcg

SEQ ID NO: 15393 - DNA, 16 bp, Homo sapiens
ctcgcgttcttgagtc

SEQ ID NO: 15394 - DNA, 17 bp, Homo sapiens
ctcgctatgtctggacg

SEQ ID NO: 15395 - DNA, 18 bp, Homo sapiens
ctcgctccgaggtccccg

SEQ ID NO: 15396 - DNA, 20 bp, Homo sapiens
ctcgctgcaggggtcggagg

SEQ ID NO: 15397 - DNA, 17 bp, Homo sapiens
ctcgctgcccaggcccc

SEQ ID NO: 15398 - DNA, 21 bp, Homo sapiens
ctcgctgccgggggacgctgg

SEQ ID NO: 15399 - DNA, 18 bp, Homo sapiens
ctcgctgctgcccgagtc

SEQ ID NO: 15400 - DNA, 20 bp, Homo sapiens
ctcgctggccttcgggtgta

SEQ ID NO: 15401 - DNA, 22 bp, Homo sapiens
ctcgctggctagtaggagagac

SEQ ID NO: 15402 - DNA, 21 bp, Homo sapiens
ctcgctggctgcgtggctcgg

SEQ ID NO: 15403 - DNA, 18 bp, Homo sapiens
ctcgctgggagagaggta

SEQ ID NO: 15404 - DNA, 18 bp, Homo sapiens
ctcgctgggtcgctcggg

SEQ ID NO: 15405 - DNA, 20 bp, Homo sapiens
ctcgctgggtcgctcgggtc

SEQ ID NO: 15406 - DNA, 18 bp, Homo sapiens
ctcgctgtcgccggagtc

SEQ ID NO: 15407 - DNA, 18 bp, Homo sapiens
ctcgctgtggcctgcggc

SEQ ID NO: 15408 - DNA, 16 bp, Homo sapiens
ctcgcttcccgacgtt

SEQ ID NO: 15409 - DNA, 16 bp, Homo sapiens
ctcggaaaaggagggg

SEQ ID NO: 15410 - DNA, 18 bp, Homo sapiens
ctcggaaagaacggatat

SEQ ID NO: 15411 - DNA, 19 bp, Homo sapiens
ctcggaaagaacggatatt

SEQ ID NO: 15412 - DNA, 15 bp, Homo sapiens
ctcggaaatggggta

SEQ ID NO: 15413 - DNA, 20 bp, Homo sapiens
ctcggaaatggggtaggtgc

SEQ ID NO: 15414 - DNA, 18 bp, Homo sapiens
ctcggaacgagactgcac

SEQ ID NO: 15415 - DNA, 20 bp, Homo sapiens
ctcggaacgagactgcacgg

SEQ ID NO: 15416 - DNA, 22 bp, Homo sapiens
ctcggaagtgccgaaagagggg

SEQ ID NO: 15417 - DNA, 19 bp, Homo sapiens
ctcggacacggatgagccg

SEQ ID NO: 15418 - DNA, 18 bp, Homo sapiens
ctcggacagcgggagcgt

SEQ ID NO: 15419 - DNA, 18 bp, Homo sapiens
ctcggaccagccatttcg

SEQ ID NO: 15420 - DNA, 17 bp, Homo sapiens
ctcggaccccggacggc

SEQ ID NO: 15421 - DNA, 20 bp, Homo sapiens
ctcggacctaggtcgcggcg

SEQ ID NO: 15422 - DNA, 16 bp, Homo sapiens
ctcggacgccgagcac

SEQ ID NO: 15423 - DNA, 18 bp, Homo sapiens
ctcggacggcccgagtcg

SEQ ID NO: 15424 - DNA, 16 bp, Homo sapiens
ctcggactggtcatac

SEQ ID NO: 15425 - DNA, 19 bp, Homo sapiens
ctcggactggtcatacggc

SEQ ID NO: 15426 - DNA, 20 bp, Homo sapiens
ctcggactggtcatacggcc

SEQ ID NO: 15427 - DNA, 21 bp, Homo sapiens
ctcggactggtcatacggcct

SEQ ID NO: 15428 - DNA, 18 bp, Homo sapiens
ctcggactgtgatggctg

SEQ ID NO: 15429 - DNA, 19 bp, Homo sapiens
ctcggagacgccgctgccg

SEQ ID NO: 15430 - DNA, 21 bp, Homo sapiens
ctcggagagcagtcctaacgg

SEQ ID NO: 15431 - DNA, 20 bp, Homo sapiens
ctcggagcaggagctggagg

SEQ ID NO: 15432 - DNA, 15 bp, Homo sapiens
ctcggagcaggcgga

SEQ ID NO: 15433 - DNA, 16 bp, Homo sapiens
ctcggagcaggcggag

SEQ ID NO: 15434 - DNA, 18 bp, Homo sapiens
ctcggagccagcagggag

SEQ ID NO: 15435 - DNA, 20 bp, Homo sapiens
ctcggagccatgccgtccaa

SEQ ID NO: 15436 - DNA, 23 bp, Homo sapiens
ctcggagcccggagcgtgcctcg

SEQ ID NO: 15437 - DNA, 18 bp, Homo sapiens
ctcggagcgcgcaggatg

SEQ ID NO: 15438 - DNA, 19 bp, Homo sapiens
ctcggaggacgcgcgctgc

SEQ ID NO: 15439 - DNA, 17 bp, Homo sapiens
ctcggaggagcggctgc

SEQ ID NO: 15440 - DNA, 17 bp, Homo sapiens
ctcggaggccggagcgg

SEQ ID NO: 15441 - DNA, 20 bp, Homo sapiens
ctcggaggcggtgaagtcgg

SEQ ID NO: 15442 - DNA, 23 bp, Homo sapiens
tgggctgcgtcaggctgagccca

SEQ ID NO: 15443 - DNA, 24 bp, Homo sapiens
tgggctgcgtcaggctgagcccat

SEQ ID NO: 15444 - DNA, 19 bp, Homo sapiens
tgggctggaccgaaaccgg

SEQ ID NO: 15445 - DNA, 18 bp, Homo sapiens
tgggctggtagcggcggc

SEQ ID NO: 15446 - DNA, 18 bp, Homo sapiens
tgggctgtgatccgcggc

SEQ ID NO: 15447 - DNA, 19 bp, Homo sapiens
tgggcttaatacagctttg

SEQ ID NO: 15448 - DNA, 18 bp, Homo sapiens
tgggctttgcacccggcg

SEQ ID NO: 15449 - DNA, 18 bp, Homo sapiens
tggggaaactggaatttc

SEQ ID NO: 15450 - DNA, 18 bp, Homo sapiens
tggggaaagtgagggggt

SEQ ID NO: 15451 - DNA, 18 bp, Homo sapiens
tggggacgggccacggcg

SEQ ID NO: 15452 - DNA, 21 bp, Homo sapiens
tggggaggaggctgcggaggc

SEQ ID NO: 15453 - DNA, 18 bp, Homo sapiens
tggggagttaattttaaa

SEQ ID NO: 15454 - DNA, 20 bp, Homo sapiens
tggggcagtctctgcatatc

SEQ ID NO: 15455 - DNA, 16 bp, Homo sapiens
tggggcccaggactgc

SEQ ID NO: 15456 - DNA, 18 bp, Homo sapiens
tggggcccgggaggccgc

SEQ ID NO: 15457 - DNA, 20 bp, Homo sapiens
tggggcccggtcgagcccgc

SEQ ID NO: 15458 - DNA, 15 bp, Homo sapiens
tggggcgagcgctct

SEQ ID NO: 15459 - DNA, 20 bp, Homo sapiens
tggggctccgagatggtcag

SEQ ID NO: 15460 - DNA, 18 bp, Homo sapiens
tggggctcgcggagcggc

SEQ ID NO: 15461 - DNA, 22 bp, Homo sapiens
tggggctgagaagccaggacgg

SEQ ID NO: 15462 - DNA, 24 bp, Homo sapiens
tggggctgagccgaggtggggccg

SEQ ID NO: 15463 - DNA, 18 bp, Homo sapiens
tgggggagcggctcgtgg

SEQ ID NO: 15464 - DNA, 22 bp, Homo sapiens
tgggggagctggccggggctca

SEQ ID NO: 15465 - DNA, 19 bp, Homo sapiens
tgggggttggagagactct

SEQ ID NO: 15466 - DNA, 17 bp, Homo sapiens
tggggtatctggattcc

SEQ ID NO: 15467 - DNA, 17 bp, Homo sapiens
tggggtcctcgatacgg

SEQ ID NO: 15468 - DNA, 17 bp, Homo sapiens
tggggtcggaaaagctg

SEQ ID NO: 15469 - DNA, 19 bp, Homo sapiens
tggggtgcggaggtgtgca

SEQ ID NO: 15470 - DNA, 20 bp, Homo sapiens
tggggtggggtcggaaaagc

SEQ ID NO: 15471 - DNA, 20 bp, Homo sapiens
tggggtttcattgttcccgc

SEQ ID NO: 15472 - DNA, 16 bp, Homo sapiens
tgggtacccggagcac

SEQ ID NO: 15473 - DNA, 18 bp, Homo sapiens
tgggtacccggagcacgg

SEQ ID NO: 15474 - DNA, 18 bp, Homo sapiens
tgggtcaggtctgatggg

SEQ ID NO: 15475 - DNA, 18 bp, Homo sapiens
tgggtccagacaccggta

SEQ ID NO: 15476 - DNA, 18 bp, Homo sapiens
tgggtgagtgcaccgcgt

SEQ ID NO: 15477 - DNA, 18 bp, Homo sapiens
tgggtgcagttcagggtg

SEQ ID NO: 15478 - DNA, 20 bp, Homo sapiens
tgggtgcgcctgcagggatc

SEQ ID NO: 15479 - DNA, 17 bp, Homo sapiens
tgggtggtactgctacc

SEQ ID NO: 15480 - DNA, 18 bp, Homo sapiens
tgggtggttgttggcgtg

SEQ ID NO: 15481 - DNA, 20 bp, Homo sapiens
tgggttccaacacctacaac

SEQ ID NO: 15482 - DNA, 19 bp, Homo sapiens
tgggttcggagaacgacgg

SEQ ID NO: 15483 - DNA, 23 bp, Homo sapiens
tgggttctgtagctgagagacga

SEQ ID NO: 15484 - DNA, 18 bp, Homo sapiens
tgggttgccaagctcgcg

SEQ ID NO: 15485 - DNA, 20 bp, Homo sapiens
tgggttgcgcctgcagagcg

SEQ ID NO: 15486 - DNA, 16 bp, Homo sapiens
tgggttggttgggcgc

SEQ ID NO: 15487 - DNA, 23 bp, Homo sapiens
tggtaaagtctgagcaggacagg

SEQ ID NO: 15488 - DNA, 18 bp, Homo sapiens
tggtacagtcatcacaag

SEQ ID NO: 15489 - DNA, 17 bp, Homo sapiens
tggtagtggataggcct

SEQ ID NO: 15490 - DNA, 18 bp, Homo sapiens
tggtagtggataggcctg

SEQ ID NO: 15491 - DNA, 19 bp, Homo sapiens
tggtcaagtgtgagcggcg

SEQ ID NO: 15492 - DNA, 14 bp, Homo sapiens
tggtcagggcgcca

SEQ ID NO: 15493 - DNA, 18 bp, Homo sapiens
tggtcatggcggagggga

SEQ ID NO: 15494 - DNA, 20 bp, Homo sapiens
tggtcctggagagaagcccc

SEQ ID NO: 15495 - DNA, 19 bp, Homo sapiens
tggtcggagatgtggcgac

SEQ ID NO: 15496 - DNA, 17 bp, Homo sapiens
tggtcgggcctccggtg

SEQ ID NO: 15497 - DNA, 17 bp, Homo sapiens
tggtcggtgggttcccg

SEQ ID NO: 15498 - DNA, 18 bp, Homo sapiens
tggtctgggaacccacgt

SEQ ID NO: 15499 - DNA, 17 bp, Homo sapiens
ctcggaggtcgtggcgc

SEQ ID NO: 15500 - DNA, 18 bp, Homo sapiens
ctcggaggtcgtggcgct

SEQ ID NO: 15501 - DNA, 18 bp, Homo sapiens
ctcggaggtggcggtgga

SEQ ID NO: 15502 - DNA, 20 bp, Homo sapiens
ctcggattaagacatcggag

SEQ ID NO: 15503 - DNA, 18 bp, Homo sapiens
ctcggcaggaagtgggac

SEQ ID NO: 15504 - DNA, 18 bp, Homo sapiens
ctcggcaggagcggagag

SEQ ID NO: 15505 - DNA, 16 bp, Homo sapiens
ctcggcaggcgagagg

SEQ ID NO: 15506 - DNA, 18 bp, Homo sapiens
ctcggcaggcgagaggcg

SEQ ID NO: 15507 - DNA, 17 bp, Homo sapiens
ctcggcaggcgggttca

SEQ ID NO: 15508 - DNA, 18 bp, Homo sapiens
ctcggcaggctggcaggc

SEQ ID NO: 15509 - DNA, 18 bp, Homo sapiens
ctcggcatgaggctggcg

SEQ ID NO: 15510 - DNA, 17 bp, Homo sapiens
ctcggcccagaagccga

SEQ ID NO: 15511 - DNA, 19 bp, Homo sapiens
ctcggccccgcaaggccat

SEQ ID NO: 15512 - DNA, 18 bp, Homo sapiens
ctcggccgacacccctca

SEQ ID NO: 15513 - DNA, 18 bp, Homo sapiens
ctcggccgagcagactgc

SEQ ID NO: 15514 - DNA, 18 bp, Homo sapiens
ctcggccgcgggagcccc

SEQ ID NO: 15515 - DNA, 16 bp, Homo sapiens
ctcggccgctgaaacc

SEQ ID NO: 15516 - DNA, 17 bp, Homo sapiens
ctcggccgctgaaaccc

SEQ ID NO: 15517 - DNA, 17 bp, Homo sapiens
ctcggccgtcgtcgttg

SEQ ID NO: 15518 - DNA, 18 bp, Homo sapiens
ctcggcctcggcgtgctg

SEQ ID NO: 15519 - DNA, 17 bp, Homo sapiens
ctcggcgcgcgcacccg

SEQ ID NO: 15520 - DNA, 17 bp, Homo sapiens
ctcggcgctgaccaggg

SEQ ID NO: 15521 - DNA, 17 bp, Homo sapiens
ctcggcgctgtcggata

SEQ ID NO: 15522 - DNA, 16 bp, Homo sapiens
ctcggcggagctggtg

SEQ ID NO: 15523 - DNA, 19 bp, Homo sapiens
ctcggctcctcgcggctcg

SEQ ID NO: 15524 - DNA, 19 bp, Homo sapiens
ctcggctcctcttcctgcc

SEQ ID NO: 15525 - DNA, 18 bp, Homo sapiens
ctcggctcgtgaacacac

SEQ ID NO: 15526 - DNA, 17 bp, Homo sapiens
ctcggctctgcgggtgt

SEQ ID NO: 15527 - DNA, 18 bp, Homo sapiens
ctcggctgccggaagggc

SEQ ID NO: 15528 - DNA, 19 bp, Homo sapiens
ctcggctgccggaagggct

SEQ ID NO: 15529 - DNA, 16 bp, Homo sapiens
ctcggctgtaaggagg

SEQ ID NO: 15530 - DNA, 17 bp, Homo sapiens
ctcggctgtaaggaggt

SEQ ID NO: 15531 - DNA, 20 bp, Homo sapiens
ctcggctgtaaggaggtggc

SEQ ID NO: 15532 - DNA, 22 bp, Homo sapiens
ctcggctgtggaccgggcggca

SEQ ID NO: 15533 - DNA, 19 bp, Homo sapiens
ctcggcttccgtccattct

SEQ ID NO: 15534 - DNA, 19 bp, Homo sapiens
ctcgggaactatcggatta

SEQ ID NO: 15535 - DNA, 18 bp, Homo sapiens
ctcgggaagtcaggccgg

SEQ ID NO: 15536 - DNA, 18 bp, Homo sapiens
ctcgggacagagatggca

SEQ ID NO: 15537 - DNA, 16 bp, Homo sapiens
ctcgggaccgcaggta

SEQ ID NO: 15538 - DNA, 18 bp, Homo sapiens
ctcgggaggacgtggccc

SEQ ID NO: 15539 - DNA, 17 bp, Homo sapiens
ctcgggaggagtggttg

SEQ ID NO: 15540 - DNA, 18 bp, Homo sapiens
ctcgggaggtggtggagt

SEQ ID NO: 15541 - DNA, 19 bp, Homo sapiens
ctcgggaggtggtggagtg

SEQ ID NO: 15542 - DNA, 18 bp, Homo sapiens
ctcgggaggtttgggcgg

SEQ ID NO: 15543 - DNA, 16 bp, Homo sapiens
ctcgggcacggtaagg

SEQ ID NO: 15544 - DNA, 18 bp, Homo sapiens
ctcgggccgcagcccgga

SEQ ID NO: 15545 - DNA, 16 bp, Homo sapiens
ctcgggcgcgacaagc

SEQ ID NO: 15546 - DNA, 20 bp, Homo sapiens
ctcgggcggctgagaagacc

SEQ ID NO: 15547 - DNA, 23 bp, Homo sapiens
ctcgggctcggaacgagactgca

SEQ ID NO: 15548 - DNA, 18 bp, Homo sapiens
ctcgggctgtttggcggg

SEQ ID NO: 15549 - DNA, 19 bp, Homo sapiens
ctcggggaagcggaaccca

SEQ ID NO: 15550 - DNA, 16 bp, Homo sapiens
ctcggggaggcccgga

SEQ ID NO: 15551 - DNA, 18 bp, Homo sapiens
ctcggggagtgaaggcct

SEQ ID NO: 15552 - DNA, 18 bp, Homo sapiens
ctcgggggcggctgtggc

SEQ ID NO: 15553 - DNA, 18 bp, Homo sapiens
ctcggggttggagccagc

SEQ ID NO: 15554 - DNA, 18 bp, Homo sapiens
ctcgggtaagaatggggc

SEQ ID NO: 15555 - DNA, 18 bp, Homo sapiens
ctcgggtaagtgaggcgc

SEQ ID NO: 15556 - DNA, 16 bp, Homo sapiens
tggtgagcgcagcgcc

SEQ ID NO: 15557 - DNA, 18 bp, Homo sapiens
tggtgagtggaccgctta

SEQ ID NO: 15558 - DNA, 20 bp, Homo sapiens
tggtgagtggcgggttcggg

SEQ ID NO: 15559 - DNA, 17 bp, Homo sapiens
tggtgatgtcatgcagg

SEQ ID NO: 15560 - DNA, 18 bp, Homo sapiens
tggtgatgtcatgcaggc

SEQ ID NO: 15561 - DNA, 23 bp, Homo sapiens
tggtgcgcggcaggatctcccgg

SEQ ID NO: 15562 - DNA, 17 bp, Homo sapiens
tggtgcggagactgctt

SEQ ID NO: 15563 - DNA, 18 bp, Homo sapiens
tggtgcggcggtcgccgt

SEQ ID NO: 15564 - DNA, 18 bp, Homo sapiens
tggtgcgggcctgcgggc

SEQ ID NO: 15565 - DNA, 18 bp, Homo sapiens
tggtgctagaggcgactc

SEQ ID NO: 15566 - DNA, 21 bp, Homo sapiens
tggtgctagtttctctaagcc

SEQ ID NO: 15567 - DNA, 17 bp, Homo sapiens
tggtggagcaggagcgg

SEQ ID NO: 15568 - DNA, 18 bp, Homo sapiens
tggtggaggaggagaaca

SEQ ID NO: 15569 - DNA, 18 bp, Homo sapiens
tggtggaggtggtaaccg

SEQ ID NO: 15570 - DNA, 21 bp, Homo sapiens
tggtggaggtggtaaccgtga

SEQ ID NO: 15571 - DNA, 20 bp, Homo sapiens
tggtggcggcggcggcggac

SEQ ID NO: 15572 - DNA, 17 bp, Homo sapiens
tggtgggtggggacggt

SEQ ID NO: 15573 - DNA, 17 bp, Homo sapiens
tggtggtcgcgagggag

SEQ ID NO: 15574 - DNA, 22 bp, Homo sapiens
tggtggtgagcgcagcgccgag

SEQ ID NO: 15575 - DNA, 23 bp, Homo sapiens
tggtggtgagcgcagcgccgagg

SEQ ID NO: 15576 - DNA, 18 bp, Homo sapiens
tggtgtgactcggccgac

SEQ ID NO: 15577 - DNA, 18 bp, Homo sapiens
tggtgtgtccccaagggc

SEQ ID NO: 15578 - DNA, 17 bp, Homo sapiens
tggttaccagatctgca

SEQ ID NO: 15579 - DNA, 20 bp, Homo sapiens
tggttactgtccgaacggcg

SEQ ID NO: 15580 - DNA, 18 bp, Homo sapiens
tggttagcgtcggcggct

SEQ ID NO: 15581 - DNA, 21 bp, Homo sapiens
tggttatcgggagttggaggg

SEQ ID NO: 15582 - DNA, 18 bp, Homo sapiens
tggttccggggacagtta

SEQ ID NO: 15583 - DNA, 19 bp, Homo sapiens
tggttctgcggcgtgcggc

SEQ ID NO: 15584 - DNA, 19 bp, Homo sapiens
tggttgcgtgagtctcctc

SEQ ID NO: 15585 - DNA, 20 bp, Homo sapiens
tggttgtgtggtcgcgtctc

SEQ ID NO: 15586 - DNA, 18 bp, Homo sapiens
tggtttaaggggaacttg

SEQ ID NO: 15587 - DNA, 20 bp, Homo sapiens
tggtttactccatgcagttg

SEQ ID NO: 15588 - DNA, 18 bp, Homo sapiens
tggtttcaaagcaggtgg

SEQ ID NO: 15589 - DNA, 17 bp, Homo sapiens
tggttttaagtaggcta

SEQ ID NO: 15590 - DNA, 18 bp, Homo sapiens
tggttttgaagacgtgga

SEQ ID NO: 15591 - DNA, 18 bp, Homo sapiens
tggttttgctccgcccgg

SEQ ID NO: 15592 - DNA, 18 bp, Homo sapiens
tggtttttgggttgttga

SEQ ID NO: 15593 - DNA, 20 bp, Homo sapiens
tgtaaacagagacgctgcaa

SEQ ID NO: 15594 - DNA, 17 bp, Homo sapiens
tgtaaccagctgggagc

SEQ ID NO: 15595 - DNA, 16 bp, Homo sapiens
tgtaacgtgcgctatg

SEQ ID NO: 15596 - DNA, 17 bp, Homo sapiens
tgtaactgcaattttag

SEQ ID NO: 15597 - DNA, 19 bp, Homo sapiens
tgtaactgcaattttagcc

SEQ ID NO: 15598 - DNA, 18 bp, Homo sapiens
tgtaagtggctgcggcgg

SEQ ID NO: 15599 - DNA, 22 bp, Homo sapiens
tgtaatgctgagacagactccc

SEQ ID NO: 15600 - DNA, 18 bp, Homo sapiens
tgtaccggcggaaattca

SEQ ID NO: 15601 - DNA, 19 bp, Homo sapiens
tgtactggcctgtgcggag

SEQ ID NO: 15602 - DNA, 17 bp, Homo sapiens
tgtagaaggtatgagga

SEQ ID NO: 15603 - DNA, 19 bp, Homo sapiens
tgtagcgaagagagtttgg

SEQ ID NO: 15604 - DNA, 13 bp, Homo sapiens
tgtagcgggcgca

SEQ ID NO: 15605 - DNA, 16 bp, Homo sapiens
tgtaggcctgggggcg

SEQ ID NO: 15606 - DNA, 17 bp, Homo sapiens
tgtagttggcatctccg

SEQ ID NO: 15607 - DNA, 20 bp, Homo sapiens
tgtcacaggccccatgtgag

SEQ ID NO: 15608 - DNA, 18 bp, Homo sapiens
tgtcacgtggtgtgcgtg

SEQ ID NO: 15609 - DNA, 19 bp, Homo sapiens
tgtcacttctcaaagcatc

SEQ ID NO: 15610 - DNA, 18 bp, Homo sapiens
tgtcacttggctctctgg

SEQ ID NO: 15611 - DNA, 16 bp, Homo sapiens
tgtcagagtcttggcc

SEQ ID NO: 15612 - DNA, 21 bp, Homo sapiens
tgtcagagtcttggccggagc

SEQ ID NO: 15613 - DNA, 17 bp, Homo sapiens
ctcgggttagcacccta

SEQ ID NO: 15614 - DNA, 18 bp, Homo sapiens
ctcgggttaggaagcgga

SEQ ID NO: 15615 - DNA, 19 bp, Homo sapiens
ctcgggttcttggggctgt

SEQ ID NO: 15616 - DNA, 20 bp, Homo sapiens
ctcggtaggggaggaattgg

SEQ ID NO: 15617 - DNA, 18 bp, Homo sapiens
ctcggtcgcgcggagtga

SEQ ID NO: 15618 - DNA, 18 bp, Homo sapiens
ctcggtctgtggcagcag

SEQ ID NO: 15619 - DNA, 20 bp, Homo sapiens
ctcggtctgtggcagcagcg

SEQ ID NO: 15620 - DNA, 21 bp, Homo sapiens
ctcggtctgtggcagcagcgt

SEQ ID NO: 15621 - DNA, 23 bp, Homo sapiens
ctcggtctgtggcagcagcgttg

SEQ ID NO: 15622 - DNA, 20 bp, Homo sapiens
ctcggtgaagggccgcgggg

SEQ ID NO: 15623 - DNA, 21 bp, Homo sapiens
ctcggtgagtaagtggagcaa

SEQ ID NO: 15624 - DNA, 20 bp, Homo sapiens
ctcggtgcagcgggacaggg

SEQ ID NO: 15625 - DNA, 19 bp, Homo sapiens
ctcggtgcaggatctcaac

SEQ ID NO: 15626 - DNA, 18 bp, Homo sapiens
ctcggtggcggtggtgga

SEQ ID NO: 15627 - DNA, 18 bp, Homo sapiens
ctcggtgtctggttacgg

SEQ ID NO: 15628 - DNA, 21 bp, Homo sapiens
ctcggtgtgggtgcgacccga

SEQ ID NO: 15629 - DNA, 18 bp, Homo sapiens
ctcggtttcctggggcta

SEQ ID NO: 15630 - DNA, 19 bp, Homo sapiens
ctcgtaagtgagccccccc

SEQ ID NO: 15631 - DNA, 16 bp, Homo sapiens
ctcgtactcgtgcgcc

SEQ ID NO: 15632 - DNA, 20 bp, Homo sapiens
ctcgtaggtaggaggaggag

SEQ ID NO: 15633 - DNA, 21 bp, Homo sapiens
ctcgtaggtaggaggaggagt

SEQ ID NO: 15634 - DNA, 17 bp, Homo sapiens
ctcgtcatggaatacgc

SEQ ID NO: 15635 - DNA, 17 bp, Homo sapiens
ctcgtcatggcggccct

SEQ ID NO: 15636 - DNA, 22 bp, Homo sapiens
ctcgtcatttcctccagctaga

SEQ ID NO: 15637 - DNA, 18 bp, Homo sapiens
ctcgtcctcttgtgtagc

SEQ ID NO: 15638 - DNA, 21 bp, Homo sapiens
ctcgtcgtactgaccgagcgg

SEQ ID NO: 15639 - DNA, 18 bp, Homo sapiens
ctcgtctcctcccggccg

SEQ ID NO: 15640 - DNA, 17 bp, Homo sapiens
ctcgtctgccagccggc

SEQ ID NO: 15641 - DNA, 18 bp, Homo sapiens
ctcgtcttcgcccgccat

SEQ ID NO: 15642 - DNA, 18 bp, Homo sapiens
ctcgtgacaatcttcggg

SEQ ID NO: 15643 - DNA, 24 bp, Homo sapiens
ctcgtgcaatggcgtccgggctgg

SEQ ID NO: 15644 - DNA, 17 bp, Homo sapiens
ctcgtgcagctggggcg

SEQ ID NO: 15645 - DNA, 18 bp, Homo sapiens
ctcgtgcgggtgtacaag

SEQ ID NO: 15646 - DNA, 18 bp, Homo sapiens
ctcgtggaacaatgtcgg

SEQ ID NO: 15647 - DNA, 17 bp, Homo sapiens
ctcgtggcgggcggtgc

SEQ ID NO: 15648 - DNA, 19 bp, Homo sapiens
ctcgtggctgttgcggatg

SEQ ID NO: 15649 - DNA, 18 bp, Homo sapiens
ctcgtgggctcggacgag

SEQ ID NO: 15650 - DNA, 18 bp, Homo sapiens
ctcgtgtggggtctccgg

SEQ ID NO: 15651 - DNA, 17 bp, Homo sapiens
ctcgttcgccctaaagg

SEQ ID NO: 15652 - DNA, 21 bp, Homo sapiens
ctcgttgcgcagtagtgctag

SEQ ID NO: 15653 - DNA, 18 bp, Homo sapiens
ctcgttggggactaaggc

SEQ ID NO: 15654 - DNA, 19 bp, Homo sapiens
ctcgttggggactaaggcg

SEQ ID NO: 15655 - DNA, 20 bp, Homo sapiens
ctcgttggggactaaggcgt

SEQ ID NO: 15656 - DNA, 21 bp, Homo sapiens
ctcgttggggactaaggcgtc

SEQ ID NO: 15657 - DNA, 17 bp, Homo sapiens
ctctaatttgttgtggg

SEQ ID NO: 15658 - DNA, 19 bp, Homo sapiens
ctctaccgcagtcgtttga

SEQ ID NO: 15659 - DNA, 16 bp, Homo sapiens
ctctacctgccccgcc

SEQ ID NO: 15660 - DNA, 18 bp, Homo sapiens
ctctagcagctgccgctg

SEQ ID NO: 15661 - DNA, 21 bp, Homo sapiens
ctctaggcctttcggtttgcg

SEQ ID NO: 15662 - DNA, 18 bp, Homo sapiens
ctctagggatggacggtg

SEQ ID NO: 15663 - DNA, 18 bp, Homo sapiens
ctctagtaggtcttcggc

SEQ ID NO: 15664 - DNA, 18 bp, Homo sapiens
ctctagtagtgcagcttc

SEQ ID NO: 15665 - DNA, 20 bp, Homo sapiens
ctctagtgagcgcggacgga

SEQ ID NO: 15666 - DNA, 22 bp, Homo sapiens
ctctagtgagcgcggacggatg

SEQ ID NO: 15667 - DNA, 18 bp, Homo sapiens
ctctagtggctggagtcc

SEQ ID NO: 15668 - DNA, 23 bp, Homo sapiens
ctctagtggctggagtccgggca

SEQ ID NO: 15669 - DNA, 16 bp, Homo sapiens
ctctataagttgtcga

SEQ ID NO: 15670 - DNA, 18 bp, Homo sapiens
tgtcatccgcggagcgac

SEQ ID NO: 15671 - DNA, 18 bp, Homo sapiens
tgtcatgcagggtgtgag

SEQ ID NO: 15672 - DNA, 20 bp, Homo sapiens
tgtcatgcagggtgtgagca

SEQ ID NO: 15673 - DNA, 17 bp, Homo sapiens
tgtcatggaggacgccg

SEQ ID NO: 15674 - DNA, 18 bp, Homo sapiens
tgtccaatgcccacccgg

SEQ ID NO: 15675 - DNA, 22 bp, Homo sapiens
tgtcccagccgggttcgtgtcg

SEQ ID NO: 15676 - DNA, 19 bp, Homo sapiens
tgtcccatttacccgaccc

SEQ ID NO: 15677 - DNA, 19 bp, Homo sapiens
tgtcctgcgccgattggca

SEQ ID NO: 15678 - DNA, 18 bp, Homo sapiens
tgtcgaagctagaggacc

SEQ ID NO: 15679 - DNA, 22 bp, Homo sapiens
tgtcgagcgtcgagctcccaaa

SEQ ID NO: 15680 - DNA, 18 bp, Homo sapiens
tgtcgcggaggctgctgc

SEQ ID NO: 15681 - DNA, 18 bp, Homo sapiens
tgtcgggctcgttcgagc

SEQ ID NO: 15682 - DNA, 24 bp, Homo sapiens
tgtcggggctcctcaagaagaggg

SEQ ID NO: 15683 - DNA, 18 bp, Homo sapiens
tgtcggtctgcgcgggcg

SEQ ID NO: 15684 - DNA, 18 bp, Homo sapiens
tgtcggtcttggagcgac

SEQ ID NO: 15685 - DNA, 19 bp, Homo sapiens
tgtcgtaaagtcaccagcg

SEQ ID NO: 15686 - DNA, 20 bp, Homo sapiens
tgtcgtggacgccgtgccgt

SEQ ID NO: 15687 - DNA, 16 bp, Homo sapiens
tgtcgtggcgcggctt

SEQ ID NO: 15688 - DNA, 21 bp, Homo sapiens
tgtcgtggcgcggcttcccgc

SEQ ID NO: 15689 - DNA, 17 bp, Homo sapiens
tgtcgttgcagtagctg

SEQ ID NO: 15690 - DNA, 17 bp, Homo sapiens
tgtctcagagaggcttg

SEQ ID NO: 15691 - DNA, 16 bp, Homo sapiens
tgtctcccggtgcagc

SEQ ID NO: 15692 - DNA, 19 bp, Homo sapiens
tgtctccggccataatgac

SEQ ID NO: 15693 - DNA, 17 bp, Homo sapiens
tgtctgacaggtgaggc

SEQ ID NO: 15694 - DNA, 18 bp, Homo sapiens
tgtctgagcagtgaaggt

SEQ ID NO: 15695 - DNA, 21 bp, Homo sapiens
tgtctggtcgtggcaaacaag

SEQ ID NO: 15696 - DNA, 18 bp, Homo sapiens
tgtctgtggtggccgcgg

SEQ ID NO: 15697 - DNA, 18 bp, Homo sapiens
tgtctgttgtgtcttgtt

SEQ ID NO: 15698 - DNA, 20 bp, Homo sapiens
tgtcttcgccgagcggggct

SEQ ID NO: 15699 - DNA, 19 bp, Homo sapiens
tgtcttgaaactgacgtaa

SEQ ID NO: 15700 - DNA, 19 bp, Homo sapiens
tgtgaagacatagctgcgg

SEQ ID NO: 15701 - DNA, 19 bp, Homo sapiens
tgtgaaggcgagcagacgc

SEQ ID NO: 15702 - DNA, 23 bp, Homo sapiens
tgtgaattgcaggacacattgat

SEQ ID NO: 15703 - DNA, 19 bp, Homo sapiens
tgtgacgctttccctgggc

SEQ ID NO: 15704 - DNA, 18 bp, Homo sapiens
tgtgactgggaagatggc

SEQ ID NO: 15705 - DNA, 16 bp, Homo sapiens
tgtgaggagaaaaccc

SEQ ID NO: 15706 - DNA, 18 bp, Homo sapiens
tgtgaggcggttgtagaa

SEQ ID NO: 15707 - DNA, 17 bp, Homo sapiens
tgtgaggtagcggcggc

SEQ ID NO: 15708 - DNA, 18 bp, Homo sapiens
tgtgaggtagcggcggca

SEQ ID NO: 15709 - DNA, 20 bp, Homo sapiens
tgtgagtgagctcgtgtgcc

SEQ ID NO: 15710 - DNA, 18 bp, Homo sapiens
tgtgcaaatgaatgcctt

SEQ ID NO: 15711 - DNA, 20 bp, Homo sapiens
tgtgcatccctccgctcgca

SEQ ID NO: 15712 - DNA, 18 bp, Homo sapiens
tgtgcccatctatcagca

SEQ ID NO: 15713 - DNA, 20 bp, Homo sapiens
tgtgcgacgcgggtcggagg

SEQ ID NO: 15714 - DNA, 20 bp, Homo sapiens
tgtgcggcggggaccgcgac

SEQ ID NO: 15715 - DNA, 18 bp, Homo sapiens
tgtgcgggtttcggttgg

SEQ ID NO: 15716 - DNA, 18 bp, Homo sapiens
tgtgcgtctttgcgtctg

SEQ ID NO: 15717 - DNA, 20 bp, Homo sapiens
tgtgctggtgagtgtgacgg

SEQ ID NO: 15718 - DNA, 18 bp, Homo sapiens
tgtgcttggcggacagac

SEQ ID NO: 15719 - DNA, 24 bp, Homo sapiens
tgtgcttggcggacagacaggcga

SEQ ID NO: 15720 - DNA, 18 bp, Homo sapiens
tgtgcttgtgggtgaggg

SEQ ID NO: 15721 - DNA, 18 bp, Homo sapiens
tgtgctttgagtagaagc

SEQ ID NO: 15722 - DNA, 18 bp, Homo sapiens
tgtggaaaatgccaccag

SEQ ID NO: 15723 - DNA, 17 bp, Homo sapiens
tgtggacgggaggatgg

SEQ ID NO: 15724 - DNA, 20 bp, Homo sapiens
tgtggagccggagctgggcg

SEQ ID NO: 15725 - DNA, 20 bp, Homo sapiens
tgtggagtggcgtagacgag

SEQ ID NO: 15726 - DNA, 19 bp, Homo sapiens
tgtggcccactcccaccgc

SEQ ID NO: 15727 - DNA, 20 bp, Homo sapiens
ctctatcttgttgccggaag

SEQ ID NO: 15728 - DNA, 19 bp, Homo sapiens
ctctcaaggaaagtagtcg

SEQ ID NO: 15729 - DNA, 19 bp, Homo sapiens
ctctccgacagcagatcca

SEQ ID NO: 15730 - DNA, 21 bp, Homo sapiens
ctctccgccacctccaccgcg

SEQ ID NO: 15731 - DNA, 17 bp, Homo sapiens
ctctccgctgcggggga

SEQ ID NO: 15732 - DNA, 19 bp, Homo sapiens
ctctcctaacctcgctctc

SEQ ID NO: 15733 - DNA, 19 bp, Homo sapiens
ctctcctagcagcatccat

SEQ ID NO: 15734 - DNA, 16 bp, Homo sapiens
ctctcctgctctcgcg

SEQ ID NO: 15735 - DNA, 23 bp, Homo sapiens
ctctcgcccaactcccagacacc

SEQ ID NO: 15736 - DNA, 18 bp, Homo sapiens
ctctcgccttacgacagc

SEQ ID NO: 15737 - DNA, 17 bp, Homo sapiens
ctctcgcgcgtccgagc

SEQ ID NO: 15738 - DNA, 15 bp, Homo sapiens
ctctcgcggcccgag

SEQ ID NO: 15739 - DNA, 18 bp, Homo sapiens
ctctcgctgtcgccggag

SEQ ID NO: 15740 - DNA, 18 bp, Homo sapiens
ctctcggagaccagattc

SEQ ID NO: 15741 - DNA, 20 bp, Homo sapiens
ctctcggagttttgtggggg

SEQ ID NO: 15742 - DNA, 21 bp, Homo sapiens
ctctcggctcctcgcggctcg

SEQ ID NO: 15743 - DNA, 22 bp, Homo sapiens
ctctcggctcctcgcggctcgc

SEQ ID NO: 15744 - DNA, 17 bp, Homo sapiens
ctctcgggggagcaggg

SEQ ID NO: 15745 - DNA, 20 bp, Homo sapiens
ctctcggtctgtggcagcag

SEQ ID NO: 15746 - DNA, 19 bp, Homo sapiens
ctctcggttataagatggc

SEQ ID NO: 15747 - DNA, 18 bp, Homo sapiens
ctctcggtttgtctgggt

SEQ ID NO: 15748 - DNA, 18 bp, Homo sapiens
ctctctcagggccttaaa

SEQ ID NO: 15749 - DNA, 22 bp, Homo sapiens
ctctctccgccccgggtcgctg

SEQ ID NO: 15750 - DNA, 19 bp, Homo sapiens
ctctctctctctgactgaa

SEQ ID NO: 15751 - DNA, 21 bp, Homo sapiens
ctctctctttcactgcaaggc

SEQ ID NO: 15752 - DNA, 19 bp, Homo sapiens
ctctctggcaagaggcaag

SEQ ID NO: 15753 - DNA, 18 bp, Homo sapiens
ctctctggctggagcttg

SEQ ID NO: 15754 - DNA, 22 bp, Homo sapiens
ctctctttcactgcaaggcggc

SEQ ID NO: 15755 - DNA, 18 bp, Homo sapiens
ctctgaaggcatggcgcg

SEQ ID NO: 15756 - DNA, 20 bp, Homo sapiens
ctctgaaggcatggcgcgta

SEQ ID NO: 15757 - DNA, 17 bp, Homo sapiens
ctctgaagggctccagc

SEQ ID NO: 15758 - DNA, 18 bp, Homo sapiens
ctctgagcagcagacggg

SEQ ID NO: 15759 - DNA, 18 bp, Homo sapiens
ctctgagcagccattgaa

SEQ ID NO: 15760 - DNA, 16 bp, Homo sapiens
ctctgaggtgagggcg

SEQ ID NO: 15761 - DNA, 18 bp, Homo sapiens
ctctgcagagtcgagagt

SEQ ID NO: 15762 - DNA, 19 bp, Homo sapiens
ctctgcagagtcgagagtg

SEQ ID NO: 15763 - DNA, 18 bp, Homo sapiens
ctctgcaggaacccggcg

SEQ ID NO: 15764 - DNA, 20 bp, Homo sapiens
ctctgcatcgacagcgggag

SEQ ID NO: 15765 - DNA, 18 bp, Homo sapiens
ctctgcatcgatcgccgc

SEQ ID NO: 15766 - DNA, 18 bp, Homo sapiens
ctctgccagactggagag

SEQ ID NO: 15767 - DNA, 18 bp, Homo sapiens
ctctgcgtgcggtcagtg

SEQ ID NO: 15768 - DNA, 18 bp, Homo sapiens
ctctgcgttctgtagtgg

SEQ ID NO: 15769 - DNA, 24 bp, Homo sapiens
ctctgctccgccgcggccggaggt

SEQ ID NO: 15770 - DNA, 19 bp, Homo sapiens
ctctgctgaccctctctcg

SEQ ID NO: 15771 - DNA, 18 bp, Homo sapiens
ctctgctggcagaggttg

SEQ ID NO: 15772 - DNA, 21 bp, Homo sapiens
ctctggacagtttgagcagca

SEQ ID NO: 15773 - DNA, 23 bp, Homo sapiens
ctctggacagtttgagcagcatt

SEQ ID NO: 15774 - DNA, 18 bp, Homo sapiens
ctctggacgctgaggccc

SEQ ID NO: 15775 - DNA, 18 bp, Homo sapiens
ctctggactgcggaggca

SEQ ID NO: 15776 - DNA, 19 bp, Homo sapiens
ctctggactgcggaggcac

SEQ ID NO: 15777 - DNA, 18 bp, Homo sapiens
ctctggacttgggaggct

SEQ ID NO: 15778 - DNA, 18 bp, Homo sapiens
ctctggcaagaggcaaga

SEQ ID NO: 15779 - DNA, 18 bp, Homo sapiens
ctctggcagtaggcacca

SEQ ID NO: 15780 - DNA, 22 bp, Homo sapiens
ctctggcggcagccggagcttc

SEQ ID NO: 15781 - DNA, 20 bp, Homo sapiens
ctctgggaagcggcagcaga

SEQ ID NO: 15782 - DNA, 18 bp, Homo sapiens
ctctgggagaggggactc

SEQ ID NO: 15783 - DNA, 19 bp, Homo sapiens
ctctgggagaggggactcc

SEQ ID NO: 15784 - DNA, 19 bp, Homo sapiens
tgtggccgcgtcggtgtcc

SEQ ID NO: 15785 - DNA, 19 bp, Homo sapiens
tgtggcggcggtagttcca

SEQ ID NO: 15786 - DNA, 18 bp, Homo sapiens
tgtggctcctaccagcca

SEQ ID NO: 15787 - DNA, 18 bp, Homo sapiens
tgtggctgcggcggcggc

SEQ ID NO: 15788 - DNA, 20 bp, Homo sapiens
tgtggctgtcgctgcccgtc

SEQ ID NO: 15789 - DNA, 16 bp, Homo sapiens
tgtgggagcgaagcgg

SEQ ID NO: 15790 - DNA, 20 bp, Homo sapiens
tgtgggattggatgagtctc

SEQ ID NO: 15791 - DNA, 18 bp, Homo sapiens
tgtgggctggggttggtg

SEQ ID NO: 15792 - DNA, 19 bp, Homo sapiens
tgtggggtgtttgtcgcag

SEQ ID NO: 15793 - DNA, 17 bp, Homo sapiens
tgtgggtacccggagca

SEQ ID NO: 15794 - DNA, 18 bp, Homo sapiens
tgtgtagtccgctccggc

SEQ ID NO: 15795 - DNA, 20 bp, Homo sapiens
tgtgtcagatcagggatcat

SEQ ID NO: 15796 - DNA, 18 bp, Homo sapiens
tgtgtgaaaatcaggaag

SEQ ID NO: 15797 - DNA, 18 bp, Homo sapiens
tgtgtgagccgccagtat

SEQ ID NO: 15798 - DNA, 20 bp, Homo sapiens
tgtgtgctgggtgccgagaa

SEQ ID NO: 15799 - DNA, 18 bp, Homo sapiens
tgtgtggcctcccaagat

SEQ ID NO: 15800 - DNA, 18 bp, Homo sapiens
tgtgtgggctccgcgcgc

SEQ ID NO: 15801 - DNA, 18 bp, Homo sapiens
tgtgtggttgcaacggag

SEQ ID NO: 15802 - DNA, 19 bp, Homo sapiens
tgttaactccgcggtcagt

SEQ ID NO: 15803 - DNA, 16 bp, Homo sapiens
tgttacaactgagtcc

SEQ ID NO: 15804 - DNA, 18 bp, Homo sapiens
tgttcctgctgccaggct

SEQ ID NO: 15805 - DNA, 22 bp, Homo sapiens
tgttcgcggacgctggggacgg

SEQ ID NO: 15806 - DNA, 21 bp, Homo sapiens
tgttcgcgggagcgccgcacc

SEQ ID NO: 15807 - DNA, 18 bp, Homo sapiens
tgttcgcttgggttcctg

SEQ ID NO: 15808 - DNA, 17 bp, Homo sapiens
tgttctacagctatggc

SEQ ID NO: 15809 - DNA, 20 bp, Homo sapiens
tgttgcattttgtttagtac

SEQ ID NO: 15810 - DNA, 17 bp, Homo sapiens
tgttgcgaggttctgag

SEQ ID NO: 15811 - DNA, 19 bp, Homo sapiens
tgttgcgaggttctgagcg

SEQ ID NO: 15812 - DNA, 21 bp, Homo sapiens
tgttgcggccgggccgccgcc

SEQ ID NO: 15813 - DNA, 17 bp, Homo sapiens
tgttggcagctgccggg

SEQ ID NO: 15814 - DNA, 15 bp, Homo sapiens
tgttggccgggcgga

SEQ ID NO: 15815 - DNA, 18 bp, Homo sapiens
tgttgtcatttccggggt

SEQ ID NO: 15816 - DNA, 19 bp, Homo sapiens
tgttgtcatttccggggta

SEQ ID NO: 15817 - DNA, 18 bp, Homo sapiens
tgttgttggttgggggcc

SEQ ID NO: 15818 - DNA, 19 bp, Homo sapiens
tgttgtttgagtttcttca

SEQ ID NO: 15819 - DNA, 20 bp, Homo sapiens
tgtttggaaattgatagaaa

SEQ ID NO: 15820 - DNA, 19 bp, Homo sapiens
tgtttggtggagcccgcga

SEQ ID NO: 15821 - DNA, 18 bp, Homo sapiens
tgtttgtttgagtgaatc

SEQ ID NO: 15822 - DNA, 18 bp, Homo sapiens
ttaaaccacatggctatc

SEQ ID NO: 15823 - DNA, 18 bp, Homo sapiens
ttaaagctgagcgaccca

SEQ ID NO: 15824 - DNA, 16 bp, Homo sapiens
ttaaagggcccgcggc

SEQ ID NO: 15825 - DNA, 19 bp, Homo sapiens
ttaaccaagtaaaacagca

SEQ ID NO: 15826 - DNA, 23 bp, Homo sapiens
ttaacccccagcggccttgcgga

SEQ ID NO: 15827 - DNA, 18 bp, Homo sapiens
ttaagatgttaggccaac

SEQ ID NO: 15828 - DNA, 18 bp, Homo sapiens
ttaatcgggtcggagcca

SEQ ID NO: 15829 - DNA, 18 bp, Homo sapiens
ttaatggggggaaaaggg

SEQ ID NO: 15830 - DNA, 19 bp, Homo sapiens
ttaattctcacgctgcggc

SEQ ID NO: 15831 - DNA, 18 bp, Homo sapiens
ttaattttaaatcggtac

SEQ ID NO: 15832 - DNA, 18 bp, Homo sapiens
ttacaaagggccggagcg

SEQ ID NO: 15833 - DNA, 18 bp, Homo sapiens
ttacacgggcatccccac

SEQ ID NO: 15834 - DNA, 23 bp, Homo sapiens
ttacacttcatgtctcctagcca

SEQ ID NO: 15835 - DNA, 20 bp, Homo sapiens
ttacagcgtgaatcccttag

SEQ ID NO: 15836 - DNA, 22 bp, Homo sapiens
ttacaggaaactggctagaaga

SEQ ID NO: 15837 - DNA, 18 bp, Homo sapiens
ttacctggttgatcctgc

SEQ ID NO: 15838 - DNA, 19 bp, Homo sapiens
ttacctggttgatcctgcc

SEQ ID NO: 15839 - DNA, 20 bp, Homo sapiens
ttacctggttgatcctgcca

SEQ ID NO: 15840 - DNA, 21 bp, Homo sapiens
ttacctggttgatcctgccag

SEQ ID NO: 15841 - DNA, 23 bp, Homo sapiens
ctctgggccggatctcgtctcgc

SEQ ID NO: 15842 - DNA, 18 bp, Homo sapiens
ctctggggatcgggaccg

SEQ ID NO: 15843 - DNA, 19 bp, Homo sapiens
ctctggggatcgggaccgc

SEQ ID NO: 15844 - DNA, 18 bp, Homo sapiens
ctctggtgagtggctcgg

SEQ ID NO: 15845 - DNA, 16 bp, Homo sapiens
ctctgtggtccgatct

SEQ ID NO: 15846 - DNA, 19 bp, Homo sapiens
ctctgtgtgccatggacgg

SEQ ID NO: 15847 - DNA, 18 bp, Homo sapiens
ctctgtgtggctcctcgg

SEQ ID NO: 15848 - DNA, 20 bp, Homo sapiens
ctctgtgtggctcctcggct

SEQ ID NO: 15849 - DNA, 20 bp, Homo sapiens
ctcttaatttcagagccggg

SEQ ID NO: 15850 - DNA, 18 bp, Homo sapiens
ctcttaggaagcctggga

SEQ ID NO: 15851 - DNA, 18 bp, Homo sapiens
ctcttagtcgcgggccga

SEQ ID NO: 15852 - DNA, 18 bp, Homo sapiens
ctcttccatattggttaa

SEQ ID NO: 15853 - DNA, 18 bp, Homo sapiens
ctcttcctcgtagtgccg

SEQ ID NO: 15854 - DNA, 18 bp, Homo sapiens
ctcttcctctttccctaa

SEQ ID NO: 15855 - DNA, 22 bp, Homo sapiens
ctcttcctttccaacttggacg

SEQ ID NO: 15856 - DNA, 23 bp, Homo sapiens
ctcttcgccggttcccggccccg

SEQ ID NO: 15857 - DNA, 19 bp, Homo sapiens
ctcttctagcagtttcttg

SEQ ID NO: 15858 - DNA, 20 bp, Homo sapiens
ctcttctcggctcagtctca

SEQ ID NO: 15859 - DNA, 18 bp, Homo sapiens
ctcttgcaatggagacgg

SEQ ID NO: 15860 - DNA, 19 bp, Homo sapiens
ctcttgggtgtggtggggc

SEQ ID NO: 15861 - DNA, 17 bp, Homo sapiens
ctcttggtggacgggcc

SEQ ID NO: 15862 - DNA, 22 bp, Homo sapiens
ctcttgtacgacagaggtggtt

SEQ ID NO: 15863 - DNA, 18 bp, Homo sapiens
ctcttgtttttagtctcg

SEQ ID NO: 15864 - DNA, 19 bp, Homo sapiens
ctctttacggtactaggca

SEQ ID NO: 15865 - DNA, 17 bp, Homo sapiens
ctctttccaacgctgta

SEQ ID NO: 15866 - DNA, 18 bp, Homo sapiens
ctctttttccggctggaa

SEQ ID NO: 15867 - DNA, 20 bp, Homo sapiens
ctgaaaatcgcggagaccgc

SEQ ID NO: 15868 - DNA, 20 bp, Homo sapiens
ctgaaccgagccctgccgaa

SEQ ID NO: 15869 - DNA, 18 bp, Homo sapiens
ctgaaccggtctcttcct

SEQ ID NO: 15870 - DNA, 17 bp, Homo sapiens
ctgaaccggtgtggcga

SEQ ID NO: 15871 - DNA, 18 bp, Homo sapiens
ctgaacgctgccatggct

SEQ ID NO: 15872 - DNA, 22 bp, Homo sapiens
ctgaacgcttcggtaggataag

SEQ ID NO: 15873 - DNA, 23 bp, Homo sapiens
ctgaagacattttccccgcacaa

SEQ ID NO: 15874 - DNA, 18 bp, Homo sapiens
ctgaagcggctggatctg

SEQ ID NO: 15875 - DNA, 18 bp, Homo sapiens
ctgaagctccaaaggcca

SEQ ID NO: 15876 - DNA, 18 bp, Homo sapiens
ctgacagaggaggctccg

SEQ ID NO: 15877 - DNA, 18 bp, Homo sapiens
ctgacagcattcgggccg

SEQ ID NO: 15878 - DNA, 21 bp, Homo sapiens
ctgacaggctgggccggcgcc

SEQ ID NO: 15879 - DNA, 22 bp, Homo sapiens
ctgacatgtcgtcccggcctgg

SEQ ID NO: 15880 - DNA, 18 bp, Homo sapiens
ctgaccccccagaaatac

SEQ ID NO: 15881 - DNA, 18 bp, Homo sapiens
ctgaccccgcagtgggcg

SEQ ID NO: 15882 - DNA, 19 bp, Homo sapiens
ctgaccccgcagtgggcgc

SEQ ID NO: 15883 - DNA, 18 bp, Homo sapiens
ctgaccgggactgcagcc

SEQ ID NO: 15884 - DNA, 18 bp, Homo sapiens
ctgacgagcgggtcaggg

SEQ ID NO: 15885 - DNA, 21 bp, Homo sapiens
ctgacgcatttccggagcgcc

SEQ ID NO: 15886 - DNA, 17 bp, Homo sapiens
ctgacgccaggacaccc

SEQ ID NO: 15887 - DNA, 18 bp, Homo sapiens
ctgacgtcgcctttcccg

SEQ ID NO: 15888 - DNA, 20 bp, Homo sapiens
ctgacgttgcagctgccgtc

SEQ ID NO: 15889 - DNA, 17 bp, Homo sapiens
ctgacttaggccacagg

SEQ ID NO: 15890 - DNA, 17 bp, Homo sapiens
ctgagaacgcgggtcca

SEQ ID NO: 15891 - DNA, 18 bp, Homo sapiens
ctgagaagccaagactga

SEQ ID NO: 15892 - DNA, 20 bp, Homo sapiens
ctgagaagccaagactgagc

SEQ ID NO: 15893 - DNA, 22 bp, Homo sapiens
ctgagaagccaagactgagccg

SEQ ID NO: 15894 - DNA, 18 bp, Homo sapiens
ctgagaaggggactcctc

SEQ ID NO: 15895 - DNA, 23 bp, Homo sapiens
ctgagacgagacgcagggtggct

SEQ ID NO: 15896 - DNA, 18 bp, Homo sapiens
ctgagacgtgttgcagcc

SEQ ID NO: 15897 - DNA, 17 bp, Homo sapiens
ctgagaggcagcgaact

SEQ ID NO: 15898 - DNA, 22 bp, Homo sapiens
ttacctggttgatcctgccagt

SEQ ID NO: 15899 - DNA, 23 bp, Homo sapiens
ttacctggttgatcctgccagta

SEQ ID NO: 15900 - DNA, 24 bp, Homo sapiens
ttacctggttgatcctgccagtag

SEQ ID NO: 15901 - DNA, 18 bp, Homo sapiens
ttacgctcgtcagccggt

SEQ ID NO: 15902 - DNA, 19 bp, Homo sapiens
ttacggccggagctgtttg

SEQ ID NO: 15903 - DNA, 18 bp, Homo sapiens
ttactagggcaatctgcc

SEQ ID NO: 15904 - DNA, 17 bp, Homo sapiens
ttactattgtgcggctg

SEQ ID NO: 15905 - DNA, 21 bp, Homo sapiens
ttactggggagagaaagaaaa

SEQ ID NO: 15906 - DNA, 18 bp, Homo sapiens
ttacttcttttcttggct

SEQ ID NO: 15907 - DNA, 19 bp, Homo sapiens
ttacttcttttcttggcta

SEQ ID NO: 15908 - DNA, 18 bp, Homo sapiens
ttagaccacgggttgcag

SEQ ID NO: 15909 - DNA, 18 bp, Homo sapiens
ttagagagtggggacgtc

SEQ ID NO: 15910 - DNA, 19 bp, Homo sapiens
ttagaggcggggaggcctg

SEQ ID NO: 15911 - DNA, 21 bp, Homo sapiens
ttagcctcgtggatgtgggcc

SEQ ID NO: 15912 - DNA, 18 bp, Homo sapiens
ttagcgaccaattgtcat

SEQ ID NO: 15913 - DNA, 18 bp, Homo sapiens
ttagcggagcacgggcaa

SEQ ID NO: 15914 - DNA, 20 bp, Homo sapiens
ttagcggggactacgatcca

SEQ ID NO: 15915 - DNA, 19 bp, Homo sapiens
ttagctgaacgcggagctg

SEQ ID NO: 15916 - DNA, 18 bp, Homo sapiens
ttagctttctcccgaacg

SEQ ID NO: 15917 - DNA, 21 bp, Homo sapiens
ttagctttctcccgaacgcca

SEQ ID NO: 15918 - DNA, 18 bp, Homo sapiens
ttaggaaccgtaggcatg

SEQ ID NO: 15919 - DNA, 20 bp, Homo sapiens
ttagggagtccttggagcgc

SEQ ID NO: 15920 - DNA, 19 bp, Homo sapiens
ttagggctctggtggcggc

SEQ ID NO: 15921 - DNA, 19 bp, Homo sapiens
ttagggtgcctggggcctg

SEQ ID NO: 15922 - DNA, 18 bp, Homo sapiens
ttaggtgctgaaggctgt

SEQ ID NO: 15923 - DNA, 16 bp, Homo sapiens
ttagtgactggggcgg

SEQ ID NO: 15924 - DNA, 18 bp, Homo sapiens
ttagtgcaggtcctgaaa

SEQ ID NO: 15925 - DNA, 18 bp, Homo sapiens
ttagtggaagaacgcgaa

SEQ ID NO: 15926 - DNA, 18 bp, Homo sapiens
ttagttggctactcgcca

SEQ ID NO: 15927 - DNA, 18 bp, Homo sapiens
ttagttttgctgccggga

SEQ ID NO: 15928 - DNA, 21 bp, Homo sapiens
ttatgatttcaaggcgaagct

SEQ ID NO: 15929 - DNA, 14 bp, Homo sapiens
ttatggcggcgctg

SEQ ID NO: 15930 - DNA, 19 bp, Homo sapiens
ttatggtggtggagtctgc

SEQ ID NO: 15931 - DNA, 18 bp, Homo sapiens
ttcaaactagtggcggga

SEQ ID NO: 15932 - DNA, 18 bp, Homo sapiens
ttcaaagctgagggagcg

SEQ ID NO: 15933 - DNA, 17 bp, Homo sapiens
ttcaagagtccgcagga

SEQ ID NO: 15934 - DNA, 19 bp, Homo sapiens
ttcaagtgagttgcgaact

SEQ ID NO: 15935 - DNA, 21 bp, Homo sapiens
ttcaagtgagttgcgaactcc

SEQ ID NO: 15936 - DNA, 17 bp, Homo sapiens
ttcaagttccgcagccc

SEQ ID NO: 15937 - DNA, 19 bp, Homo sapiens
ttcacaggatctgtttgag

SEQ ID NO: 15938 - DNA, 21 bp, Homo sapiens
ttcaccttttgttccctatcc

SEQ ID NO: 15939 - DNA, 22 bp, Homo sapiens
ttcacgggagtagaaggaggcg

SEQ ID NO: 15940 - DNA, 24 bp, Homo sapiens
ttcactgtgcaatttaagtaaaac

SEQ ID NO: 15941 - DNA, 18 bp, Homo sapiens
ttcagacggtgaggaccc

SEQ ID NO: 15942 - DNA, 18 bp, Homo sapiens
ttcagacttcagaaggac

SEQ ID NO: 15943 - DNA, 19 bp, Homo sapiens
ttcagagaagggaaacaca

SEQ ID NO: 15944 - DNA, 18 bp, Homo sapiens
ttcagagctgtatccggg

SEQ ID NO: 15945 - DNA, 18 bp, Homo sapiens
ttcagattgatccttccc

SEQ ID NO: 15946 - DNA, 20 bp, Homo sapiens
ttcagcgaccacggtgggta

SEQ ID NO: 15947 - DNA, 20 bp, Homo sapiens
ttcagcgggggacgtagcca

SEQ ID NO: 15948 - DNA, 18 bp, Homo sapiens
ttcagcgtcccggtgtgg

SEQ ID NO: 15949 - DNA, 18 bp, Homo sapiens
ttcaggagttgcggggtg

SEQ ID NO: 15950 - DNA, 16 bp, Homo sapiens
ttcagggagcttgtcg

SEQ ID NO: 15951 - DNA, 17 bp, Homo sapiens
ttcaggggtcgcggggg

SEQ ID NO: 15952 - DNA, 17 bp, Homo sapiens
ttcagtgtctcagagga

SEQ ID NO: 15953 - DNA, 19 bp, Homo sapiens
ttcagttgtttgcgggcgg

SEQ ID NO: 15954 - DNA, 20 bp, Homo sapiens
ttcatagagccagcgggcgc

SEQ ID NO: 15955 - DNA, 18 bp, Homo sapiens
ctgagagggagggctctg

SEQ ID NO: 15956 - DNA, 18 bp, Homo sapiens
ctgagataaccaggactg

SEQ ID NO: 15957 - DNA, 19 bp, Homo sapiens
ctgagcacagctgcacagt

SEQ ID NO: 15958 - DNA, 19 bp, Homo sapiens
ctgagcagaactaggcgcg

SEQ ID NO: 15959 - DNA, 17 bp, Homo sapiens
ctgagcagacgtccaga

SEQ ID NO: 15960 - DNA, 16 bp, Homo sapiens
ctgagcagccattgaa

SEQ ID NO: 15961 - DNA, 17 bp, Homo sapiens
ctgagcagcgcttcctt

SEQ ID NO: 15962 - DNA, 22 bp, Homo sapiens
ctgagccaggaggaagcagcgg

SEQ ID NO: 15963 - DNA, 18 bp, Homo sapiens
ctgagccctgcggaacct

SEQ ID NO: 15964 - DNA, 19 bp, Homo sapiens
ctgagccctgcggaacctc

SEQ ID NO: 15965 - DNA, 17 bp, Homo sapiens
ctgagcggcggagacgg

SEQ ID NO: 15966 - DNA, 18 bp, Homo sapiens
ctgagcggctgggcgacc

SEQ ID NO: 15967 - DNA, 19 bp, Homo sapiens
ctgagcggctgggcgaccg

SEQ ID NO: 15968 - DNA, 16 bp, Homo sapiens
ctgagcgttgtctgtg

SEQ ID NO: 15969 - DNA, 18 bp, Homo sapiens
ctgagctccaggtctcgt

SEQ ID NO: 15970 - DNA, 21 bp, Homo sapiens
ctgagctgcagaggattcctg

SEQ ID NO: 15971 - DNA, 19 bp, Homo sapiens
ctgaggaccggcaacatgg

SEQ ID NO: 15972 - DNA, 20 bp, Homo sapiens
ctgaggagaaggactcagcc

SEQ ID NO: 15973 - DNA, 17 bp, Homo sapiens
ctgaggagatggatcgg

SEQ ID NO: 15974 - DNA, 18 bp, Homo sapiens
ctgaggaggactgccggt

SEQ ID NO: 15975 - DNA, 18 bp, Homo sapiens
ctgaggcacagagtgaag

SEQ ID NO: 15976 - DNA, 18 bp, Homo sapiens
ctgaggcagctgtagcgg

SEQ ID NO: 15977 - DNA, 16 bp, Homo sapiens
ctgaggcgaagcttcg

SEQ ID NO: 15978 - DNA, 18 bp, Homo sapiens
ctgaggcggctgtggccg

SEQ ID NO: 15979 - DNA, 22 bp, Homo sapiens
ctgaggcggctgtggccgcgtc

SEQ ID NO: 15980 - DNA, 18 bp, Homo sapiens
ctgaggcgggggggagtt

SEQ ID NO: 15981 - DNA, 18 bp, Homo sapiens
ctgaggctccggcggacc

SEQ ID NO: 15982 - DNA, 18 bp, Homo sapiens
ctgaggctggcatctggg

SEQ ID NO: 15983 - DNA, 18 bp, Homo sapiens
ctgaggctgtggctacgg

SEQ ID NO: 15984 - DNA, 23 bp, Homo sapiens
ctgagggccctgccctgccctcc

SEQ ID NO: 15985 - DNA, 18 bp, Homo sapiens
ctgagggcggccggggct

SEQ ID NO: 15986 - DNA, 16 bp, Homo sapiens
ctgagggctaaaggtt

SEQ ID NO: 15987 - DNA, 18 bp, Homo sapiens
ctgagggggcggtagcgg

SEQ ID NO: 15988 - DNA, 18 bp, Homo sapiens
ctgaggggtcagtggttc

SEQ ID NO: 15989 - DNA, 18 bp, Homo sapiens
ctgagggtagcgagagac

SEQ ID NO: 15990 - DNA, 17 bp, Homo sapiens
ctgagtacatcgagacg

SEQ ID NO: 15991 - DNA, 18 bp, Homo sapiens
ctgagtggaacatggcga

SEQ ID NO: 15992 - DNA, 17 bp, Homo sapiens
ctgagtgtgggggccct

SEQ ID NO: 15993 - DNA, 18 bp, Homo sapiens
ctgagtttttctttcagg

SEQ ID NO: 15994 - DNA, 18 bp, Homo sapiens
ctgatacttcccaggacg

SEQ ID NO: 15995 - DNA, 17 bp, Homo sapiens
ctgatgctgctgctggc

SEQ ID NO: 15996 - DNA, 22 bp, Homo sapiens
ctgatggtgtcggtgagcgcgt

SEQ ID NO: 15997 - DNA, 18 bp, Homo sapiens
ctgattgggtagaaagcg

SEQ ID NO: 15998 - DNA, 18 bp, Homo sapiens
ctgattgtgttctagggg

SEQ ID NO: 15999 - DNA, 19 bp, Homo sapiens
ctgcaaccgcgaccatggg

SEQ ID NO: 16000 - DNA, 19 bp, Homo sapiens
ctgcaagcatccgcgttgc

SEQ ID NO: 16001 - DNA, 17 bp, Homo sapiens
ctgcacagcctgcggcg

SEQ ID NO: 16002 - DNA, 22 bp, Homo sapiens
ctgcacgacggggctggacgta

SEQ ID NO: 16003 - DNA, 19 bp, Homo sapiens
ctgcacgggagcaggggag

SEQ ID NO: 16004 - DNA, 18 bp, Homo sapiens
ctgcactctggaggacca

SEQ ID NO: 16005 - DNA, 19 bp, Homo sapiens
ctgcagacccgcgacccgg

SEQ ID NO: 16006 - DNA, 17 bp, Homo sapiens
ctgcagactccgggtcg

SEQ ID NO: 16007 - DNA, 19 bp, Homo sapiens
ctgcagagagcttcagttt

SEQ ID NO: 16008 - DNA, 18 bp, Homo sapiens
ctgcagagtcgagagtgg

SEQ ID NO: 16009 - DNA, 19 bp, Homo sapiens
ctgcagagtcgagagtggg

SEQ ID NO: 16010 - DNA, 20 bp, Homo sapiens
ctgcagagtcgagcgtgggg

SEQ ID NO: 16011 - DNA, 20 bp, Homo sapiens
ctgcagagtctacttcagaa

SEQ ID NO: 16012 - DNA, 18 bp, Homo sapiens
ttcatcataaattgtgca

SEQ ID NO: 16013 - DNA, 19 bp, Homo sapiens
ttcattgtgtttacgaggc

SEQ ID NO: 16014 - DNA, 22 bp, Homo sapiens
ttcatttcctcactgactataa

SEQ ID NO: 16015 - DNA, 19 bp, Homo sapiens
ttccaacacctacaacagg

SEQ ID NO: 16016 - DNA, 18 bp, Homo sapiens
ttccacatgcagagcaga

SEQ ID NO: 16017 - DNA, 22 bp, Homo sapiens
ttccagaattatggcgaagtcc

SEQ ID NO: 16018 - DNA, 17 bp, Homo sapiens
ttccagagagcgggccc

SEQ ID NO: 16019 - DNA, 18 bp, Homo sapiens
ttccagagcaagcatgga

SEQ ID NO: 16020 - DNA, 18 bp, Homo sapiens
ttccagccagtgaggatc

SEQ ID NO: 16021 - DNA, 16 bp, Homo sapiens
ttccagcgcagctaga

SEQ ID NO: 16022 - DNA, 17 bp, Homo sapiens
ttccaggaccacaattc

SEQ ID NO: 16023 - DNA, 24 bp, Homo sapiens
ttccaggcactctcattcatagag

SEQ ID NO: 16024 - DNA, 19 bp, Homo sapiens
ttcccagagtgctccgcgg

SEQ ID NO: 16025 - DNA, 19 bp, Homo sapiens
ttcccagcttcccgtccgc

SEQ ID NO: 16026 - DNA, 18 bp, Homo sapiens
ttcccagcttgctccgta

SEQ ID NO: 16027 - DNA, 18 bp, Homo sapiens
ttcccatcttgcaaggta

SEQ ID NO: 16028 - DNA, 23 bp, Homo sapiens
ttccccaattgtgtgggggctgc

SEQ ID NO: 16029 - DNA, 19 bp, Homo sapiens
ttccccctgagtcgctggg

SEQ ID NO: 16030 - DNA, 17 bp, Homo sapiens
ttccccggcggcaggcg

SEQ ID NO: 16031 - DNA, 16 bp, Homo sapiens
ttccccttctctgtgt

SEQ ID NO: 16032 - DNA, 17 bp, Homo sapiens
ttccccttctctgtgtc

SEQ ID NO: 16033 - DNA, 18 bp, Homo sapiens
ttcccgaccagagagaac

SEQ ID NO: 16034 - DNA, 18 bp, Homo sapiens
ttcccgccacactccaga

SEQ ID NO: 16035 - DNA, 17 bp, Homo sapiens
ttcccggcgtctcgtct

SEQ ID NO: 16036 - DNA, 24 bp, Homo sapiens
ttcccgggagaggctgggacccgg

SEQ ID NO: 16037 - DNA, 21 bp, Homo sapiens
ttcccgtcccggcggctctgg

SEQ ID NO: 16038 - DNA, 20 bp, Homo sapiens
ttcccgttgttatggaggta

SEQ ID NO: 16039 - DNA, 17 bp, Homo sapiens
ttccctcaagatggcgg

SEQ ID NO: 16040 - DNA, 20 bp, Homo sapiens
ttccctccgtcgccgccaag

SEQ ID NO: 16041 - DNA, 22 bp, Homo sapiens
ttcccttgacacggcggacgcc

SEQ ID NO: 16042 - DNA, 18 bp, Homo sapiens
ttcccttttgcggccatc

SEQ ID NO: 16043 - DNA, 17 bp, Homo sapiens
ttccgaagggaccaccg

SEQ ID NO: 16044 - DNA, 16 bp, Homo sapiens
ttccgagtcagtgacg

SEQ ID NO: 16045 - DNA, 18 bp, Homo sapiens
ttccgcaccgctgacgca

SEQ ID NO: 16046 - DNA, 18 bp, Homo sapiens
ttccgcacggttggagga

SEQ ID NO: 16047 - DNA, 22 bp, Homo sapiens
ttccgccccggctgccgcgggc

SEQ ID NO: 16048 - DNA, 17 bp, Homo sapiens
ttccgccctcgcgggac

SEQ ID NO: 16049 - DNA, 20 bp, Homo sapiens
ttccgccctctccttcgtcc

SEQ ID NO: 16050 - DNA, 17 bp, Homo sapiens
ttccgccgtcgtcgccg

SEQ ID NO: 16051 - DNA, 18 bp, Homo sapiens
ttccgctggcttcaggtt

SEQ ID NO: 16052 - DNA, 17 bp, Homo sapiens
ttccggagagtggcggg

SEQ ID NO: 16053 - DNA, 17 bp, Homo sapiens
ttccggagccttcaaac

SEQ ID NO: 16054 - DNA, 23 bp, Homo sapiens
ttccggaggggaaggctttccga

SEQ ID NO: 16055 - DNA, 18 bp, Homo sapiens
ttccggccaagccgcttc

SEQ ID NO: 16056 - DNA, 18 bp, Homo sapiens
ttccggccagaggtcccg

SEQ ID NO: 16057 - DNA, 21 bp, Homo sapiens
ttccggcgcgccggccacggt

SEQ ID NO: 16058 - DNA, 18 bp, Homo sapiens
ttccggctccagcggctg

SEQ ID NO: 16059 - DNA, 17 bp, Homo sapiens
ttccggctccgtcgtgg

SEQ ID NO: 16060 - DNA, 18 bp, Homo sapiens
ttccggctggggaagatg

SEQ ID NO: 16061 - DNA, 19 bp, Homo sapiens
ttccgggacaacatggcgc

SEQ ID NO: 16062 - DNA, 18 bp, Homo sapiens
ttccgggcgagcgtgagc

SEQ ID NO: 16063 - DNA, 18 bp, Homo sapiens
ttccggggtctctagtag

SEQ ID NO: 16064 - DNA, 18 bp, Homo sapiens
ttccggtagcagctagtc

SEQ ID NO: 16065 - DNA, 16 bp, Homo sapiens
ttccggtcggcgtgag

SEQ ID NO: 16066 - DNA, 17 bp, Homo sapiens
ttccggtgcagtgaagg

SEQ ID NO: 16067 - DNA, 18 bp, Homo sapiens
ttccggtgggcctccatc

SEQ ID NO: 16068 - DNA, 15 bp, Homo sapiens
ttccgttaggtctga

SEQ ID NO: 16069 - DNA, 19 bp, Homo sapiens
ctgcagcaggctcggctct

SEQ ID NO: 16070 - DNA, 18 bp, Homo sapiens
ctgcagccttcagtctcc

SEQ ID NO: 16071 - DNA, 18 bp, Homo sapiens
ctgcagcgggcctctgcg

SEQ ID NO: 16072 - DNA, 18 bp, Homo sapiens
ctgcagctagaacagcct

SEQ ID NO: 16073 - DNA, 18 bp, Homo sapiens
ctgcagctggcattggcc

SEQ ID NO: 16074 - DNA, 17 bp, Homo sapiens
ctgcaggagcgcggaac

SEQ ID NO: 16075 - DNA, 18 bp, Homo sapiens
ctgcaggagcgcggaaca

SEQ ID NO: 16076 - DNA, 18 bp, Homo sapiens
ctgcaggatggtaggctg

SEQ ID NO: 16077 - DNA, 18 bp, Homo sapiens
ctgcagtcggagacttgc

SEQ ID NO: 16078 - DNA, 18 bp, Homo sapiens
ctgcagtctgggagtctt

SEQ ID NO: 16079 - DNA, 18 bp, Homo sapiens
ctgcattgcccgactccg

SEQ ID NO: 16080 - DNA, 18 bp, Homo sapiens
ctgccactgccacctcgc

SEQ ID NO: 16081 - DNA, 18 bp, Homo sapiens
ctgccagcgctgggcgag

SEQ ID NO: 16082 - DNA, 19 bp, Homo sapiens
ctgccaggcccagtgggca

SEQ ID NO: 16083 - DNA, 17 bp, Homo sapiens
ctgccaggtggcgagta

SEQ ID NO: 16084 - DNA, 17 bp, Homo sapiens
ctgcccccagctggcgc

SEQ ID NO: 16085 - DNA, 23 bp, Homo sapiens
ctgccccgccatgacccggctga

SEQ ID NO: 16086 - DNA, 16 bp, Homo sapiens
ctgccccgcgtcgggc

SEQ ID NO: 16087 - DNA, 16 bp, Homo sapiens
ctgcccgcccggactg

SEQ ID NO: 16088 - DNA, 18 bp, Homo sapiens
ctgccctgccaacagttc

SEQ ID NO: 16089 - DNA, 19 bp, Homo sapiens
ctgccgccgccgccgccca

SEQ ID NO: 16090 - DNA, 19 bp, Homo sapiens
ctgccgcggagttggaaac

SEQ ID NO: 16091 - DNA, 16 bp, Homo sapiens
ctgccggacccaggtg

SEQ ID NO: 16092 - DNA, 16 bp, Homo sapiens
ctgccggcgctctctg

SEQ ID NO: 16093 - DNA, 19 bp, Homo sapiens
ctgccgggcgtggtgtcgg

SEQ ID NO: 16094 - DNA, 18 bp, Homo sapiens
ctgccgggtgtgttagaa

SEQ ID NO: 16095 - DNA, 21 bp, Homo sapiens
ctgccggtgcaggggaacccc

SEQ ID NO: 16096 - DNA, 18 bp, Homo sapiens
ctgcctagcgcggcccaa

SEQ ID NO: 16097 - DNA, 17 bp, Homo sapiens
ctgcctccccctctcag

SEQ ID NO: 16098 - DNA, 17 bp, Homo sapiens
ctgcctctacccccgcc

SEQ ID NO: 16099 - DNA, 19 bp, Homo sapiens
ctgcctgcaggactgttcg

SEQ ID NO: 16100 - DNA, 18 bp, Homo sapiens
ctgcgaagcccaggccgc

SEQ ID NO: 16101 - DNA, 19 bp, Homo sapiens
ctgcgaagggaggtgagcg

SEQ ID NO: 16102 - DNA, 20 bp, Homo sapiens
ctgcgaagggaggtgagcgt

SEQ ID NO: 16103 - DNA, 21 bp, Homo sapiens
ctgcgaagggaggtgagcgtt

SEQ ID NO: 16104 - DNA, 20 bp, Homo sapiens
ctgcgacagcctggacagca

SEQ ID NO: 16105 - DNA, 19 bp, Homo sapiens
ctgcgacagcctgggtaag

SEQ ID NO: 16106 - DNA, 21 bp, Homo sapiens
ctgcgacttctctaatgtctg

SEQ ID NO: 16107 - DNA, 20 bp, Homo sapiens
ctgcgagatttgggcacttt

SEQ ID NO: 16108 - DNA, 18 bp, Homo sapiens
ctgcgagccgtcggaccc

SEQ ID NO: 16109 - DNA, 21 bp, Homo sapiens
ctgcgagcgggcgcgcgggcg

SEQ ID NO: 16110 - DNA, 17 bp, Homo sapiens
ctgcgaggccctgcgag

SEQ ID NO: 16111 - DNA, 22 bp, Homo sapiens
ctgcgatgtgggccacgctgcc

SEQ ID NO: 16112 - DNA, 17 bp, Homo sapiens
ctgcgcacgcgcatgga

SEQ ID NO: 16113 - DNA, 18 bp, Homo sapiens
ctgcgcagagggctggac

SEQ ID NO: 16114 - DNA, 18 bp, Homo sapiens
ctgcgccacgtctgaggc

SEQ ID NO: 16115 - DNA, 18 bp, Homo sapiens
ctgcgcccttcagtatcg

SEQ ID NO: 16116 - DNA, 23 bp, Homo sapiens
ctgcgccgaggtcgtagcggaac

SEQ ID NO: 16117 - DNA, 19 bp, Homo sapiens
ctgcgcgatgactggacgg

SEQ ID NO: 16118 - DNA, 20 bp, Homo sapiens
ctgcgcgcttggggagaggg

SEQ ID NO: 16119 - DNA, 18 bp, Homo sapiens
ctgcgcggagcggccctg

SEQ ID NO: 16120 - DNA, 19 bp, Homo sapiens
ctgcgcggcgcagacatgg

SEQ ID NO: 16121 - DNA, 19 bp, Homo sapiens
ctgcgctgccggaggaaac

SEQ ID NO: 16122 - DNA, 18 bp, Homo sapiens
ctgcgctgctcggaccgc

SEQ ID NO: 16123 - DNA, 20 bp, Homo sapiens
ctgcgctgggcttgccggga

SEQ ID NO: 16124 - DNA, 21 bp, Homo sapiens
ctgcgctgggcttgccgggac

SEQ ID NO: 16125 - DNA, 18 bp, Homo sapiens
ctgcgctggtcggcggag

SEQ ID NO: 16126 - DNA, 18 bp, Homo sapiens
ttcctagagcggacaggg

SEQ ID NO: 16127 - DNA, 23 bp, Homo sapiens
ttcctagtcctttcctgctgatg

SEQ ID NO: 16128 - DNA, 18 bp, Homo sapiens
ttcctcctcgggggcctc

SEQ ID NO: 16129 - DNA, 18 bp, Homo sapiens
ttcctcctgcttccccgc

SEQ ID NO: 16130 - DNA, 18 bp, Homo sapiens
ttcctcgttgcccccgcc

SEQ ID NO: 16131 - DNA, 22 bp, Homo sapiens
ttcctctctcagggccttaaag

SEQ ID NO: 16132 - DNA, 19 bp, Homo sapiens
ttcctctgctctggtgacc

SEQ ID NO: 16133 - DNA, 17 bp, Homo sapiens
ttcctctttcggccgcg

SEQ ID NO: 16134 - DNA, 20 bp, Homo sapiens
ttcctgacctcgcacccagc

SEQ ID NO: 16135 - DNA, 18 bp, Homo sapiens
ttcctgcagtgtttctgg

SEQ ID NO: 16136 - DNA, 19 bp, Homo sapiens
ttcctgcgggaaacatggc

SEQ ID NO: 16137 - DNA, 20 bp, Homo sapiens
ttcctggctctgggcagcag

SEQ ID NO: 16138 - DNA, 15 bp, Homo sapiens
ttcctgggatagcga

SEQ ID NO: 16139 - DNA, 17 bp, Homo sapiens
ttcctgtcacttctcaa

SEQ ID NO: 16140 - DNA, 19 bp, Homo sapiens
ttcctgtgggacgtggtgg

SEQ ID NO: 16141 - DNA, 18 bp, Homo sapiens
ttcctttatccgtcgcca

SEQ ID NO: 16142 - DNA, 19 bp, Homo sapiens
ttccttttacctcgttgca

SEQ ID NO: 16143 - DNA, 15 bp, Homo sapiens
ttcgaacgcacttgc

SEQ ID NO: 16144 - DNA, 20 bp, Homo sapiens
ttcgacgctggcggtggacg

SEQ ID NO: 16145 - DNA, 19 bp, Homo sapiens
ttcgacggcgccgggcgag

SEQ ID NO: 16146 - DNA, 17 bp, Homo sapiens
ttcgagaggtgtcaggg

SEQ ID NO: 16147 - DNA, 18 bp, Homo sapiens
ttcgagagtaggtgagcg

SEQ ID NO: 16148 - DNA, 18 bp, Homo sapiens
ttcgagcgcttcggcaac

SEQ ID NO: 16149 - DNA, 18 bp, Homo sapiens
ttcgaggactcgcgggtg

SEQ ID NO: 16150 - DNA, 24 bp, Homo sapiens
ttcgatcatgtctggtagaggcaa

SEQ ID NO: 16151 - DNA, 20 bp, Homo sapiens
ttcgcaacgggtttgccgcc

SEQ ID NO: 16152 - DNA, 18 bp, Homo sapiens
ttcgcagtggtcgcttct

SEQ ID NO: 16153 - DNA, 18 bp, Homo sapiens
ttcgccacattcgcttcc

SEQ ID NO: 16154 - DNA, 18 bp, Homo sapiens
ttcgcccgccatggccga

SEQ ID NO: 16155 - DNA, 19 bp, Homo sapiens
ttcgcccgccatggccgag

SEQ ID NO: 16156 - DNA, 18 bp, Homo sapiens
ttcgcggagctcgggctg

SEQ ID NO: 16157 - DNA, 20 bp, Homo sapiens
ttcgcggctgctcaagatga

SEQ ID NO: 16158 - DNA, 17 bp, Homo sapiens
ttcgctcgccgcctcgc

SEQ ID NO: 16159 - DNA, 18 bp, Homo sapiens
ttcgctctttttgtcagc

SEQ ID NO: 16160 - DNA, 18 bp, Homo sapiens
ttcggaagcgctggagct

SEQ ID NO: 16161 - DNA, 16 bp, Homo sapiens
ttcggacgagaggggc

SEQ ID NO: 16162 - DNA, 17 bp, Homo sapiens
ttcggacgtcttgcctg

SEQ ID NO: 16163 - DNA, 18 bp, Homo sapiens
ttcggacgtcttgcctgt

SEQ ID NO: 16164 - DNA, 17 bp, Homo sapiens
ttcggagaacgacggcg

SEQ ID NO: 16165 - DNA, 19 bp, Homo sapiens
ttcggagagccggcgggcg

SEQ ID NO: 16166 - DNA, 18 bp, Homo sapiens
ttcggagaggcagcgcgg

SEQ ID NO: 16167 - DNA, 16 bp, Homo sapiens
ttcggagcctgctgca

SEQ ID NO: 16168 - DNA, 19 bp, Homo sapiens
ttcggagcttagccacagg

SEQ ID NO: 16169 - DNA, 16 bp, Homo sapiens
ttcggagggtggtgag

SEQ ID NO: 16170 - DNA, 19 bp, Homo sapiens
ttcggagtagagatggccg

SEQ ID NO: 16171 - DNA, 18 bp, Homo sapiens
ttcggagtttgatgtgat

SEQ ID NO: 16172 - DNA, 17 bp, Homo sapiens
ttcggatggcggagcgc

SEQ ID NO: 16173 - DNA, 15 bp, Homo sapiens
ttcggcaccgcccgc

SEQ ID NO: 16174 - DNA, 16 bp, Homo sapiens
ttcggcagagggcgct

SEQ ID NO: 16175 - DNA, 18 bp, Homo sapiens
ttcggcggcggcagaggg

SEQ ID NO: 16176 - DNA, 17 bp, Homo sapiens
ttcggcggggaagatgg

SEQ ID NO: 16177 - DNA, 18 bp, Homo sapiens
ttcggctagggtaccttg

SEQ ID NO: 16178 - DNA, 18 bp, Homo sapiens
ttcggctcccggtctcgg

SEQ ID NO: 16179 - DNA, 18 bp, Homo sapiens
ttcgggaccgactgacgg

SEQ ID NO: 16180 - DNA, 18 bp, Homo sapiens
ttcgggcgactctcggag

SEQ ID NO: 16181 - DNA, 17 bp, Homo sapiens
ttcgggcggcggccccg

SEQ ID NO: 16182 - DNA, 18 bp, Homo sapiens
ttcggggaggaggacgct

SEQ ID NO: 16183 - DNA, 20 bp, Homo sapiens
ctgcggaaggatggagctgg

SEQ ID NO: 16184 - DNA, 17 bp, Homo sapiens
ctgcggagagcccaagg

SEQ ID NO: 16185 - DNA, 18 bp, Homo sapiens
ctgcggagcggacggacg

SEQ ID NO: 16186 - DNA, 16 bp, Homo sapiens
ctgcggagtgaacggt

SEQ ID NO: 16187 - DNA, 17 bp, Homo sapiens
ctgcggagtgaacggtg

SEQ ID NO: 16188 - DNA, 19 bp, Homo sapiens
ctgcggagtgaacggtgtg

SEQ ID NO: 16189 - DNA, 17 bp, Homo sapiens
ctgcggatcaggacccg

SEQ ID NO: 16190 - DNA, 20 bp, Homo sapiens
ctgcggcaaagcgagagcct

SEQ ID NO: 16191 - DNA, 18 bp, Homo sapiens
ctgcggcgcacttccgta

SEQ ID NO: 16192 - DNA, 18 bp, Homo sapiens
ctgcggcgcaggtgccct

SEQ ID NO: 16193 - DNA, 18 bp, Homo sapiens
ctgcggcgcctgggctgc

SEQ ID NO: 16194 - DNA, 17 bp, Homo sapiens
ctgcggcggctgcgcgg

SEQ ID NO: 16195 - DNA, 17 bp, Homo sapiens
ctgcggcggtctcgctc

SEQ ID NO: 16196 - DNA, 22 bp, Homo sapiens
ctgcgggaggccctggtgactc

SEQ ID NO: 16197 - DNA, 18 bp, Homo sapiens
ctgcgggcaaaggaaggc

SEQ ID NO: 16198 - DNA, 19 bp, Homo sapiens
ctgcgggcgaaggtggcag

SEQ ID NO: 16199 - DNA, 19 bp, Homo sapiens
ctgcgggcggctggggcac

SEQ ID NO: 16200 - DNA, 20 bp, Homo sapiens
ctgcggggatggagaaccgg

SEQ ID NO: 16201 - DNA, 17 bp, Homo sapiens
ctgcgggtccaggactg

SEQ ID NO: 16202 - DNA, 18 bp, Homo sapiens
ctgcggttctgaggactg

SEQ ID NO: 16203 - DNA, 20 bp, Homo sapiens
ctgcggttcttgacactact

SEQ ID NO: 16204 - DNA, 16 bp, Homo sapiens
ctgcggtttctgcggc

SEQ ID NO: 16205 - DNA, 18 bp, Homo sapiens
ctgcgtcgctccgggagc

SEQ ID NO: 16206 - DNA, 20 bp, Homo sapiens
ctgcgtgcgctgccggacga

SEQ ID NO: 16207 - DNA, 18 bp, Homo sapiens
ctgcgtgctacggccctg

SEQ ID NO: 16208 - DNA, 18 bp, Homo sapiens
ctgcgtgctgacatagac

SEQ ID NO: 16209 - DNA, 19 bp, Homo sapiens
ctgcgtggaggtcgacgac

SEQ ID NO: 16210 - DNA, 16 bp, Homo sapiens
ctgcgtggggaggaac

SEQ ID NO: 16211 - DNA, 19 bp, Homo sapiens
ctgcgtggttcttcttctc

SEQ ID NO: 16212 - DNA, 16 bp, Homo sapiens
ctgcgttgaggatctt

SEQ ID NO: 16213 - DNA, 19 bp, Homo sapiens
ctgcgttgaggatctttgc

SEQ ID NO: 16214 - DNA, 18 bp, Homo sapiens
ctgcgttgggattccgtg

SEQ ID NO: 16215 - DNA, 16 bp, Homo sapiens
ctgctacgagtagaac

SEQ ID NO: 16216 - DNA, 17 bp, Homo sapiens
ctgctacgagtagaacg

SEQ ID NO: 16217 - DNA, 18 bp, Homo sapiens
ctgctacgagtagaacgc

SEQ ID NO: 16218 - DNA, 17 bp, Homo sapiens
ctgctacggtggactgt

SEQ ID NO: 16219 - DNA, 15 bp, Homo sapiens
ctgctccgagggccg

SEQ ID NO: 16220 - DNA, 19 bp, Homo sapiens
ctgctccgcaagggcaact

SEQ ID NO: 16221 - DNA, 18 bp, Homo sapiens
ctgctcgcgcttgggctc

SEQ ID NO: 16222 - DNA, 15 bp, Homo sapiens
ctgctcgctgcgcca

SEQ ID NO: 16223 - DNA, 16 bp, Homo sapiens
ctgctcgctgcgccac

SEQ ID NO: 16224 - DNA, 18 bp, Homo sapiens
ctgctcggagccggaggg

SEQ ID NO: 16225 - DNA, 19 bp, Homo sapiens
ctgctcggggatctgagat

SEQ ID NO: 16226 - DNA, 18 bp, Homo sapiens
ctgctctgagacatggtg

SEQ ID NO: 16227 - DNA, 19 bp, Homo sapiens
ctgctgaacttggaggcat

SEQ ID NO: 16228 - DNA, 21 bp, Homo sapiens
ctgctgcggaggcgttggagc

SEQ ID NO: 16229 - DNA, 18 bp, Homo sapiens
ctgctgcggttcatagcc

SEQ ID NO: 16230 - DNA, 17 bp, Homo sapiens
ctgctgctgcagcaaaa

SEQ ID NO: 16231 - DNA, 19 bp, Homo sapiens
ctgctggaggagttggcgt

SEQ ID NO: 16232 - DNA, 18 bp, Homo sapiens
ctgctggagtacgagcga

SEQ ID NO: 16233 - DNA, 18 bp, Homo sapiens
ctgctggcgctgtgtctg

SEQ ID NO: 16234 - DNA, 17 bp, Homo sapiens
ctgctggcggctctgca

SEQ ID NO: 16235 - DNA, 23 bp, Homo sapiens
ctgctggcggctctgcagagtcg

SEQ ID NO: 16236 - DNA, 16 bp, Homo sapiens
ctgctggcgtcctcga

SEQ ID NO: 16237 - DNA, 20 bp, Homo sapiens
ctgctggctcttcctcttgc

SEQ ID NO: 16238 - DNA, 18 bp, Homo sapiens
ctgctggggtctaggctg

SEQ ID NO: 16239 - DNA, 21 bp, Homo sapiens
ctgctgtaacagggactagca

SEQ ID NO: 16240 - DNA, 20 bp, Homo sapiens
ttcgggtatgaggctgggac

SEQ ID NO: 16241 - DNA, 18 bp, Homo sapiens
ttcgggtcctcaggcggc

SEQ ID NO: 16242 - DNA, 18 bp, Homo sapiens
ttcgggtcggtgcaaggc

SEQ ID NO: 16243 - DNA, 19 bp, Homo sapiens
ttcggtccggttgaggttg

SEQ ID NO: 16244 - DNA, 17 bp, Homo sapiens
ttcggtgagcgcgccca

SEQ ID NO: 16245 - DNA, 20 bp, Homo sapiens
ttcggtgcgccgtgggtccg

SEQ ID NO: 16246 - DNA, 17 bp, Homo sapiens
ttcggtgctgcgggttg

SEQ ID NO: 16247 - DNA, 18 bp, Homo sapiens
ttcggtgctgtgtgccgg

SEQ ID NO: 16248 - DNA, 18 bp, Homo sapiens
ttcgtactgggcagaacg

SEQ ID NO: 16249 - DNA, 16 bp, Homo sapiens
ttcgtcttagccacgc

SEQ ID NO: 16250 - DNA, 18 bp, Homo sapiens
ttcgtgactagtgaggtg

SEQ ID NO: 16251 - DNA, 21 bp, Homo sapiens
ttcgtgcgtcgggacggcgcg

SEQ ID NO: 16252 - DNA, 18 bp, Homo sapiens
ttcgtgggctgtggaggc

SEQ ID NO: 16253 - DNA, 18 bp, Homo sapiens
ttcgtgtcgccatggggc

SEQ ID NO: 16254 - DNA, 17 bp, Homo sapiens
ttcgttgaaggacacca

SEQ ID NO: 16255 - DNA, 18 bp, Homo sapiens
ttcgttgttctcggcggg

SEQ ID NO: 16256 - DNA, 18 bp, Homo sapiens
ttctagagatcgggtcgg

SEQ ID NO: 16257 - DNA, 18 bp, Homo sapiens
ttctagaggcaggcagag

SEQ ID NO: 16258 - DNA, 21 bp, Homo sapiens
ttctaggaagtgtctgtagcc

SEQ ID NO: 16259 - DNA, 16 bp, Homo sapiens
ttctcaactatggccc

SEQ ID NO: 16260 - DNA, 18 bp, Homo sapiens
ttctcaaggactgctggc

SEQ ID NO: 16261 - DNA, 18 bp, Homo sapiens
ttctcacactttcaggct

SEQ ID NO: 16262 - DNA, 19 bp, Homo sapiens
ttctcacactttcaggctc

SEQ ID NO: 16263 - DNA, 16 bp, Homo sapiens
ttctcagccaggcggc

SEQ ID NO: 16264 - DNA, 18 bp, Homo sapiens
ttctcagccaggcggcgg

SEQ ID NO: 16265 - DNA, 18 bp, Homo sapiens
ttctcagttttggtggag

SEQ ID NO: 16266 - DNA, 18 bp, Homo sapiens
ttctccatgtcagactgc

SEQ ID NO: 16267 - DNA, 18 bp, Homo sapiens
ttctccggcggctgcaga

SEQ ID NO: 16268 - DNA, 16 bp, Homo sapiens
ttctcgactccatctt

SEQ ID NO: 16269 - DNA, 17 bp, Homo sapiens
ttctcgttccccggcca

SEQ ID NO: 16270 - DNA, 20 bp, Homo sapiens
ttctctatcgacgagtctgg

SEQ ID NO: 16271 - DNA, 19 bp, Homo sapiens
ttctctgaccacttgataa

SEQ ID NO: 16272 - DNA, 22 bp, Homo sapiens
ttctctgccggtgagcgccccg

SEQ ID NO: 16273 - DNA, 18 bp, Homo sapiens
ttctctggcagtaggcac

SEQ ID NO: 16274 - DNA, 16 bp, Homo sapiens
ttctcttacatcgacc

SEQ ID NO: 16275 - DNA, 19 bp, Homo sapiens
ttctctttcccatcttgca

SEQ ID NO: 16276 - DNA, 18 bp, Homo sapiens
ttctgagcgttgtctgtg

SEQ ID NO: 16277 - DNA, 16 bp, Homo sapiens
ttctgaggttcttcac

SEQ ID NO: 16278 - DNA, 18 bp, Homo sapiens
ttctgagtgtgggggccc

SEQ ID NO: 16279 - DNA, 24 bp, Homo sapiens
ttctgcagctcctgtcagggagcg

SEQ ID NO: 16280 - DNA, 18 bp, Homo sapiens
ttctgctggagggaagtg

SEQ ID NO: 16281 - DNA, 20 bp, Homo sapiens
ttctgctggcctttctccta

SEQ ID NO: 16282 - DNA, 17 bp, Homo sapiens
ttctggaggaagcagcg

SEQ ID NO: 16283 - DNA, 19 bp, Homo sapiens
ttctggcaggtaaggaacg

SEQ ID NO: 16284 - DNA, 22 bp, Homo sapiens
ttctggcggagcgtgcttcccg

SEQ ID NO: 16285 - DNA, 19 bp, Homo sapiens
ttctgggaagatggcgaag

SEQ ID NO: 16286 - DNA, 16 bp, Homo sapiens
ttctgggtcgggacag

SEQ ID NO: 16287 - DNA, 24 bp, Homo sapiens
ttctggtcaaaatggctggtaagc

SEQ ID NO: 16288 - DNA, 16 bp, Homo sapiens
ttctggtctcggccgc

SEQ ID NO: 16289 - DNA, 17 bp, Homo sapiens
ttctgtaacgcttgtgt

SEQ ID NO: 16290 - DNA, 21 bp, Homo sapiens
ttctgtagctccgagggcagg

SEQ ID NO: 16291 - DNA, 18 bp, Homo sapiens
ttctgtaggaccaggtgt

SEQ ID NO: 16292 - DNA, 22 bp, Homo sapiens
ttctgtcatatgactgaggcgc

SEQ ID NO: 16293 - DNA, 18 bp, Homo sapiens
ttcttagaagagtacttg

SEQ ID NO: 16294 - DNA, 17 bp, Homo sapiens
ttcttagctgttagctg

SEQ ID NO: 16295 - DNA, 19 bp, Homo sapiens
ttcttaggggtcgttcgaa

SEQ ID NO: 16296 - DNA, 19 bp, Homo sapiens
ttcttccggaggcggtcac

SEQ ID NO: 16297 - DNA, 17 bp, Homo sapiens
ctgctgtcccggttcct

SEQ ID NO: 16298 - DNA, 18 bp, Homo sapiens
ctgctgtctgcggaggaa

SEQ ID NO: 16299 - DNA, 22 bp, Homo sapiens
ctgctgtgcccatctatcagca

SEQ ID NO: 16300 - DNA, 16 bp, Homo sapiens
ctgcttcgggcttcca

SEQ ID NO: 16301 - DNA, 19 bp, Homo sapiens
ctgcttgcttcggagatcc

SEQ ID NO: 16302 - DNA, 16 bp, Homo sapiens
ctgctttcttttctcc

SEQ ID NO: 16303 - DNA, 18 bp, Homo sapiens
ctggaaaagcagtaggat

SEQ ID NO: 16304 - DNA, 19 bp, Homo sapiens
ctggaaaagcagtaggatc

SEQ ID NO: 16305 - DNA, 21 bp, Homo sapiens
ctggaaaagcagtaggatcgg

SEQ ID NO: 16306 - DNA, 18 bp, Homo sapiens
ctggaaataatctgtcct

SEQ ID NO: 16307 - DNA, 18 bp, Homo sapiens
ctggaacgggagtactgc

SEQ ID NO: 16308 - DNA, 20 bp, Homo sapiens
ctggaacgggagtactgcga

SEQ ID NO: 16309 - DNA, 21 bp, Homo sapiens
ctggaacgggagtactgcgac

SEQ ID NO: 16310 - DNA, 18 bp, Homo sapiens
ctggaactggcaggcacc

SEQ ID NO: 16311 - DNA, 19 bp, Homo sapiens
ctggaactggcaggcaccg

SEQ ID NO: 16312 - DNA, 16 bp, Homo sapiens
ctggaagatgggggcg

SEQ ID NO: 16313 - DNA, 18 bp, Homo sapiens
ctggaagcgcgaggcggg

SEQ ID NO: 16314 - DNA, 18 bp, Homo sapiens
ctggaagggtcgggtgcg

SEQ ID NO: 16315 - DNA, 18 bp, Homo sapiens
ctggaagtaggaggagag

SEQ ID NO: 16316 - DNA, 20 bp, Homo sapiens
ctggacacccagcggtctga

SEQ ID NO: 16317 - DNA, 18 bp, Homo sapiens
ctggacagctggaggatg

SEQ ID NO: 16318 - DNA, 18 bp, Homo sapiens
ctggaccgagcggagttg

SEQ ID NO: 16319 - DNA, 19 bp, Homo sapiens
ctggacgcagcagccaccg

SEQ ID NO: 16320 - DNA, 19 bp, Homo sapiens
ctggacgccgagatcaagg

SEQ ID NO: 16321 - DNA, 18 bp, Homo sapiens
ctggacgcgctggaggag

SEQ ID NO: 16322 - DNA, 19 bp, Homo sapiens
ctggacgctggattagaag

SEQ ID NO: 16323 - DNA, 17 bp, Homo sapiens
ctggacgtaatggacgg

SEQ ID NO: 16324 - DNA, 17 bp, Homo sapiens
ctggacgtggagaagag

SEQ ID NO: 16325 - DNA, 19 bp, Homo sapiens
ctggacgtggcaagcaagg

SEQ ID NO: 16326 - DNA, 17 bp, Homo sapiens
ctggacgtggtgagccg

SEQ ID NO: 16327 - DNA, 18 bp, Homo sapiens
ctggactcggagcgcggt

SEQ ID NO: 16328 - DNA, 16 bp, Homo sapiens
ctggagacggcctggg

SEQ ID NO: 16329 - DNA, 18 bp, Homo sapiens
ctggagacggcctgggtg

SEQ ID NO: 16330 - DNA, 19 bp, Homo sapiens
ctggagacggcctgggtgc

SEQ ID NO: 16331 - DNA, 22 bp, Homo sapiens
ctggagacttaggaggtggtgg

SEQ ID NO: 16332 - DNA, 22 bp, Homo sapiens
ctggagagaaggcgctgggctg

SEQ ID NO: 16333 - DNA, 20 bp, Homo sapiens
ctggagagcagcatggaggc

SEQ ID NO: 16334 - DNA, 19 bp, Homo sapiens
ctggagaggaagcgactgc

SEQ ID NO: 16335 - DNA, 16 bp, Homo sapiens
ctggagccgacagacg

SEQ ID NO: 16336 - DNA, 18 bp, Homo sapiens
ctggagcggctggaagcg

SEQ ID NO: 16337 - DNA, 19 bp, Homo sapiens
ctggagctaggcgaggccc

SEQ ID NO: 16338 - DNA, 20 bp, Homo sapiens
ctggagcttgaagaagtggg

SEQ ID NO: 16339 - DNA, 16 bp, Homo sapiens
ctggaggaaccgcggt

SEQ ID NO: 16340 - DNA, 20 bp, Homo sapiens
ctggaggaagactggagcct

SEQ ID NO: 16341 - DNA, 22 bp, Homo sapiens
ctggaggacccactgcggagct

SEQ ID NO: 16342 - DNA, 18 bp, Homo sapiens
ctggaggaggaagagaaa

SEQ ID NO: 16343 - DNA, 21 bp, Homo sapiens
ctggaggcagcggcttgggcg

SEQ ID NO: 16344 - DNA, 18 bp, Homo sapiens
ctggagggcggcagcggc

SEQ ID NO: 16345 - DNA, 22 bp, Homo sapiens
ctggagggcggcagcggcgacc

SEQ ID NO: 16346 - DNA, 18 bp, Homo sapiens
ctggagtgcgagcagatc

SEQ ID NO: 16347 - DNA, 19 bp, Homo sapiens
ctggagtgcgagcagatcc

SEQ ID NO: 16348 - DNA, 19 bp, Homo sapiens
ctggatcgagtagtgtaag

SEQ ID NO: 16349 - DNA, 21 bp, Homo sapiens
ctggatcgagtagtgtaagtg

SEQ ID NO: 16350 - DNA, 18 bp, Homo sapiens
ctggatcggagggaggtt

SEQ ID NO: 16351 - DNA, 18 bp, Homo sapiens
ctggattagaaggcagca

SEQ ID NO: 16352 - DNA, 16 bp, Homo sapiens
ctggcacgtcgtgacg

SEQ ID NO: 16353 - DNA, 17 bp, Homo sapiens
ctggcacgtcgtgacgc

SEQ ID NO: 16354 - DNA, 19 bp, Homo sapiens
ttcttccgggttggaggcg

SEQ ID NO: 16355 - DNA, 19 bp, Homo sapiens
ttcttcctcagctctctcc

SEQ ID NO: 16356 - DNA, 18 bp, Homo sapiens
ttcttcgtcatgtcggga

SEQ ID NO: 16357 - DNA, 24 bp, Homo sapiens
ttcttgccggaagcggagagcggc

SEQ ID NO: 16358 - DNA, 21 bp, Homo sapiens
ttcttgctgcagcaacgcgag

SEQ ID NO: 16359 - DNA, 19 bp, Homo sapiens
ttcttggcgtcgggaccct

SEQ ID NO: 16360 - DNA, 18 bp, Homo sapiens
ttcttgtgtagacgtctg

SEQ ID NO: 16361 - DNA, 18 bp, Homo sapiens
ttcttgttacaactgagt

SEQ ID NO: 16362 - DNA, 18 bp, Homo sapiens
ttcttgttttggagaatg

SEQ ID NO: 16363 - DNA, 19 bp, Homo sapiens
ttctttcccggcctcctca

SEQ ID NO: 16364 - DNA, 17 bp, Homo sapiens
ttcttttcttggctaag

SEQ ID NO: 16365 - DNA, 16 bp, Homo sapiens
ttctttttgaggaaga

SEQ ID NO: 16366 - DNA, 20 bp, Homo sapiens
ttgaaactgtaggacaaggc

SEQ ID NO: 16367 - DNA, 23 bp, Homo sapiens
ttgaaagatagagattaatacaa

SEQ ID NO: 16368 - DNA, 18 bp, Homo sapiens
ttgaagaagtcggctctg

SEQ ID NO: 16369 - DNA, 19 bp, Homo sapiens
ttgaagccagcgtccggcc

SEQ ID NO: 16370 - DNA, 18 bp, Homo sapiens
ttgaagctgcctccgcca

SEQ ID NO: 16371 - DNA, 18 bp, Homo sapiens
ttgaagggaggtagcatc

SEQ ID NO: 16372 - DNA, 17 bp, Homo sapiens
ttgaatttcaaacacaa

SEQ ID NO: 16373 - DNA, 17 bp, Homo sapiens
ttgaatttggaaattgg

SEQ ID NO: 16374 - DNA, 21 bp, Homo sapiens
ttgacaataggagagagaaag

SEQ ID NO: 16375 - DNA, 19 bp, Homo sapiens
ttgactcggaaatgtccgg

SEQ ID NO: 16376 - DNA, 17 bp, Homo sapiens
ttgactgggatacacta

SEQ ID NO: 16377 - DNA, 18 bp, Homo sapiens
ttgagagaacggagcgga

SEQ ID NO: 16378 - DNA, 20 bp, Homo sapiens
ttgagagcggccaggccagc

SEQ ID NO: 16379 - DNA, 21 bp, Homo sapiens
ttgagcagtagctgtgagttg

SEQ ID NO: 16380 - DNA, 16 bp, Homo sapiens
ttgagcgggaccggag

SEQ ID NO: 16381 - DNA, 19 bp, Homo sapiens
ttgagcttggctttgcgca

SEQ ID NO: 16382 - DNA, 18 bp, Homo sapiens
ttgaggactgggaatccg

SEQ ID NO: 16383 - DNA, 18 bp, Homo sapiens
ttgaggagaagcgccaag

SEQ ID NO: 16384 - DNA, 22 bp, Homo sapiens
ttgaggccggaccctcgcgaga

SEQ ID NO: 16385 - DNA, 18 bp, Homo sapiens
ttgaggcggacggcgggg

SEQ ID NO: 16386 - DNA, 22 bp, Homo sapiens
ttgaggcggtgtctgcggcagc

SEQ ID NO: 16387 - DNA, 18 bp, Homo sapiens
ttgagtaatctcagataa

SEQ ID NO: 16388 - DNA, 18 bp, Homo sapiens
ttgagtggaaatgggcaa

SEQ ID NO: 16389 - DNA, 17 bp, Homo sapiens
ttgagtgtaaagtccag

SEQ ID NO: 16390 - DNA, 19 bp, Homo sapiens
ttgatacaatggtgtcgtt

SEQ ID NO: 16391 - DNA, 18 bp, Homo sapiens
ttgatggccccgactgaa

SEQ ID NO: 16392 - DNA, 18 bp, Homo sapiens
ttgcaaggggaaggaccc

SEQ ID NO: 16393 - DNA, 20 bp, Homo sapiens
ttgcaaggtaagaatcgcgg

SEQ ID NO: 16394 - DNA, 19 bp, Homo sapiens
ttgcaagtcggccaggatg

SEQ ID NO: 16395 - DNA, 18 bp, Homo sapiens
ttgcaccatcccagaagc

SEQ ID NO: 16396 - DNA, 18 bp, Homo sapiens
ttgcactcgctggaaagc

SEQ ID NO: 16397 - DNA, 20 bp, Homo sapiens
ttgcactgagtgtggctgaa

SEQ ID NO: 16398 - DNA, 17 bp, Homo sapiens
ttgcatctcttcgcctc

SEQ ID NO: 16399 - DNA, 20 bp, Homo sapiens
ttgcattactattgtgcggc

SEQ ID NO: 16400 - DNA, 19 bp, Homo sapiens
ttgcccacagacccggaag

SEQ ID NO: 16401 - DNA, 21 bp, Homo sapiens
ttgcccctggggattacgcag

SEQ ID NO: 16402 - DNA, 16 bp, Homo sapiens
ttgccccttctcggcc

SEQ ID NO: 16403 - DNA, 18 bp, Homo sapiens
ttgcccgaagcgcggacg

SEQ ID NO: 16404 - DNA, 17 bp, Homo sapiens
ttgccgatagtggtgac

SEQ ID NO: 16405 - DNA, 18 bp, Homo sapiens
ttgccgcctggacttctg

SEQ ID NO: 16406 - DNA, 18 bp, Homo sapiens
ttgccggaagcggagagc

SEQ ID NO: 16407 - DNA, 19 bp, Homo sapiens
ttgccggaagttgagcggc

SEQ ID NO: 16408 - DNA, 18 bp, Homo sapiens
ttgccgggagagagggat

SEQ ID NO: 16409 - DNA, 17 bp, Homo sapiens
ttgcctgggctggacgt

SEQ ID NO: 16410 - DNA, 18 bp, Homo sapiens
ttgcctgggctggacgtg

SEQ ID NO: 16411 - DNA, 18 bp, Homo sapiens
ctggcactggtggggagc

SEQ ID NO: 16412 - DNA, 20 bp, Homo sapiens
ctggcagagctcgccactcc

SEQ ID NO: 16413 - DNA, 20 bp, Homo sapiens
ctggcagagtggaccccgag

SEQ ID NO: 16414 - DNA, 18 bp, Homo sapiens
ctggcagccggagaggag

SEQ ID NO: 16415 - DNA, 21 bp, Homo sapiens
ctggcagcgcggcgggcagcg

SEQ ID NO: 16416 - DNA, 18 bp, Homo sapiens
ctggcagcggcggaaagt

SEQ ID NO: 16417 - DNA, 18 bp, Homo sapiens
ctggcaggaaaatgagct

SEQ ID NO: 16418 - DNA, 16 bp, Homo sapiens
ctggcaggccggcgtg

SEQ ID NO: 16419 - DNA, 17 bp, Homo sapiens
ctggcaggtaaggaacg

SEQ ID NO: 16420 - DNA, 18 bp, Homo sapiens
ctggcaggtaaggaacgc

SEQ ID NO: 16421 - DNA, 20 bp, Homo sapiens
ctggcaggtctgagcgctcc

SEQ ID NO: 16422 - DNA, 18 bp, Homo sapiens
ctggcaggtgtggattcc

SEQ ID NO: 16423 - DNA, 18 bp, Homo sapiens
ctggccccagaagcctgc

SEQ ID NO: 16424 - DNA, 18 bp, Homo sapiens
ctggccgagtccgaaaaa

SEQ ID NO: 16425 - DNA, 20 bp, Homo sapiens
ctggccgcccctggaggcta

SEQ ID NO: 16426 - DNA, 21 bp, Homo sapiens
ctggccgccgcgggcaggata

SEQ ID NO: 16427 - DNA, 19 bp, Homo sapiens
ctggccgcgggctcggtac

SEQ ID NO: 16428 - DNA, 19 bp, Homo sapiens
ctggccgcggtaagggcgg

SEQ ID NO: 16429 - DNA, 20 bp, Homo sapiens
ctggccgggcgtagacgcgg

SEQ ID NO: 16430 - DNA, 23 bp, Homo sapiens
ctggcctggagggagacctcgct

SEQ ID NO: 16431 - DNA, 20 bp, Homo sapiens
ctggcctttctcctacccac

SEQ ID NO: 16432 - DNA, 18 bp, Homo sapiens
ctggcgaacgagagacta

SEQ ID NO: 16433 - DNA, 21 bp, Homo sapiens
ctggcgacaaaatggctgccc

SEQ ID NO: 16434 - DNA, 18 bp, Homo sapiens
ctggcgcccgtaccatga

SEQ ID NO: 16435 - DNA, 19 bp, Homo sapiens
ctggcgcggcccgctccct

SEQ ID NO: 16436 - DNA, 17 bp, Homo sapiens
ctggcggaagaggcacg

SEQ ID NO: 16437 - DNA, 20 bp, Homo sapiens
ctggcggaagcggggcagac

SEQ ID NO: 16438 - DNA, 21 bp, Homo sapiens
ctggcggactgcggcgcactt

SEQ ID NO: 16439 - DNA, 18 bp, Homo sapiens
ctggcggagtggaaggta

SEQ ID NO: 16440 - DNA, 17 bp, Homo sapiens
ctggcggatgcgtcggg

SEQ ID NO: 16441 - DNA, 16 bp, Homo sapiens
ctggcggcaagagcag

SEQ ID NO: 16442 - DNA, 19 bp, Homo sapiens
ctggcggcattgaggcgga

SEQ ID NO: 16443 - DNA, 18 bp, Homo sapiens
ctggcggcgaggaaggta

SEQ ID NO: 16444 - DNA, 16 bp, Homo sapiens
ctggcggcgggcaccc

SEQ ID NO: 16445 - DNA, 18 bp, Homo sapiens
ctggcggctctgcagagt

SEQ ID NO: 16446 - DNA, 17 bp, Homo sapiens
ctggcgggcacttccta

SEQ ID NO: 16447 - DNA, 17 bp, Homo sapiens
ctggcggttccgttagg

SEQ ID NO: 16448 - DNA, 17 bp, Homo sapiens
ctggctaagctcctctc

SEQ ID NO: 16449 - DNA, 21 bp, Homo sapiens
ctggctgacagctggggacgg

SEQ ID NO: 16450 - DNA, 21 bp, Homo sapiens
ctggctgacttacagcagtca

SEQ ID NO: 16451 - DNA, 19 bp, Homo sapiens
ctggctgcggcggtctcgc

SEQ ID NO: 16452 - DNA, 18 bp, Homo sapiens
ctggctgctggtgggagg

SEQ ID NO: 16453 - DNA, 21 bp, Homo sapiens
ctggctggactcggagcgcgg

SEQ ID NO: 16454 - DNA, 19 bp, Homo sapiens
ctggctggcacccaacgtg

SEQ ID NO: 16455 - DNA, 17 bp, Homo sapiens
ctggcttcaggttccgg

SEQ ID NO: 16456 - DNA, 18 bp, Homo sapiens
ctggcttgggcgcgggcg

SEQ ID NO: 16457 - DNA, 17 bp, Homo sapiens
ctgggaaatgtcagccg

SEQ ID NO: 16458 - DNA, 24 bp, Homo sapiens
ctgggaagcgccatggcactgcag

SEQ ID NO: 16459 - DNA, 19 bp, Homo sapiens
ctgggaaggaagagggaac

SEQ ID NO: 16460 - DNA, 20 bp, Homo sapiens
ctgggaaggaggtaaaatgg

SEQ ID NO: 16461 - DNA, 18 bp, Homo sapiens
ctgggacaggcagctccg

SEQ ID NO: 16462 - DNA, 22 bp, Homo sapiens
ctgggaccagttcagcctgata

SEQ ID NO: 16463 - DNA, 18 bp, Homo sapiens
ctgggacctagctcggga

SEQ ID NO: 16464 - DNA, 17 bp, Homo sapiens
ctgggacgggggaaagg

SEQ ID NO: 16465 - DNA, 18 bp, Homo sapiens
ctgggacgggggaaagga

SEQ ID NO: 16466 - DNA, 21 bp, Homo sapiens
ctgggacgggggaaaggagac

SEQ ID NO: 16467 - DNA, 16 bp, Homo sapiens
ctgggacgggtctggg

SEQ ID NO: 16468 - DNA, 21 bp, Homo sapiens
ttgcctgggctggacgtggtt

SEQ ID NO: 16469 - DNA, 18 bp, Homo sapiens
ttgcctggtgtcggtggt

SEQ ID NO: 16470 - DNA, 18 bp, Homo sapiens
ttgcgagtagcccctcta

SEQ ID NO: 16471 - DNA, 18 bp, Homo sapiens
ttgcgcacttcccggcgc

SEQ ID NO: 16472 - DNA, 20 bp, Homo sapiens
ttgcgcagtcttcatgggtt

SEQ ID NO: 16473 - DNA, 18 bp, Homo sapiens
ttgcgcctgcagagcgca

SEQ ID NO: 16474 - DNA, 18 bp, Homo sapiens
ttgcgctgtggatggagt

SEQ ID NO: 16475 - DNA, 18 bp, Homo sapiens
ttgcggacccgggagctc

SEQ ID NO: 16476 - DNA, 18 bp, Homo sapiens
ttgcggatggtgagtgtg

SEQ ID NO: 16477 - DNA, 19 bp, Homo sapiens
ttgcggatggtgagtgtgt

SEQ ID NO: 16478 - DNA, 24 bp, Homo sapiens
ttgcggcatgggcagtatccgccg

SEQ ID NO: 16479 - DNA, 20 bp, Homo sapiens
ttgcggccacaggcgcggcg

SEQ ID NO: 16480 - DNA, 20 bp, Homo sapiens
ttgcggcctgtgcgagtagg

SEQ ID NO: 16481 - DNA, 19 bp, Homo sapiens
ttgcggcggcgacagccat

SEQ ID NO: 16482 - DNA, 18 bp, Homo sapiens
ttgcggctccagggccat

SEQ ID NO: 16483 - DNA, 17 bp, Homo sapiens
ttgcgggcctttgtgac

SEQ ID NO: 16484 - DNA, 22 bp, Homo sapiens
ttgcgggtgtctctggccctgc

SEQ ID NO: 16485 - DNA, 18 bp, Homo sapiens
ttgcgtgaggggtttgta

SEQ ID NO: 16486 - DNA, 19 bp, Homo sapiens
ttgcgtgtggtggtgagcg

SEQ ID NO: 16487 - DNA, 18 bp, Homo sapiens
ttgctaggcgctgggacg

SEQ ID NO: 16488 - DNA, 20 bp, Homo sapiens
ttgctcccctggcgactgcc

SEQ ID NO: 16489 - DNA, 16 bp, Homo sapiens
ttgctccgcccggccg

SEQ ID NO: 16490 - DNA, 18 bp, Homo sapiens
ttgctccgctgctgctgt

SEQ ID NO: 16491 - DNA, 19 bp, Homo sapiens
ttgctcggacctggagtaa

SEQ ID NO: 16492 - DNA, 19 bp, Homo sapiens
ttgctgaaaagtgcgccct

SEQ ID NO: 16493 - DNA, 18 bp, Homo sapiens
ttgctgaaggcggaccgc

SEQ ID NO: 16494 - DNA, 20 bp, Homo sapiens
ttgctgactggaaaaccgga

SEQ ID NO: 16495 - DNA, 17 bp, Homo sapiens
ttgctgagaggaggcga

SEQ ID NO: 16496 - DNA, 19 bp, Homo sapiens
ttgctgcccgccgcagccc

SEQ ID NO: 16497 - DNA, 17 bp, Homo sapiens
ttgctgcgtctactgcg

SEQ ID NO: 16498 - DNA, 23 bp, Homo sapiens
ttgctggttctgtgaggtagcgg

SEQ ID NO: 16499 - DNA, 16 bp, Homo sapiens
ttgctttccaaaatgg

SEQ ID NO: 16500 - DNA, 17 bp, Homo sapiens
ttggaagttcctaattc

SEQ ID NO: 16501 - DNA, 18 bp, Homo sapiens
ttggacgccggcggagac

SEQ ID NO: 16502 - DNA, 18 bp, Homo sapiens
ttggacgcgcagcaggag

SEQ ID NO: 16503 - DNA, 20 bp, Homo sapiens
ttggagcgcagaaccggccg

SEQ ID NO: 16504 - DNA, 19 bp, Homo sapiens
ttggagcgctgtgttggga

SEQ ID NO: 16505 - DNA, 18 bp, Homo sapiens
ttggagcgggtctagtaa

SEQ ID NO: 16506 - DNA, 18 bp, Homo sapiens
ttggaggctgagagcagc

SEQ ID NO: 16507 - DNA, 18 bp, Homo sapiens
ttggaggtagagagacgc

SEQ ID NO: 16508 - DNA, 17 bp, Homo sapiens
ttggatagggttgacgt

SEQ ID NO: 16509 - DNA, 17 bp, Homo sapiens
ttggatgtgggaggatt

SEQ ID NO: 16510 - DNA, 20 bp, Homo sapiens
ttggcagctgccgggcggtc

SEQ ID NO: 16511 - DNA, 18 bp, Homo sapiens
ttggccccagaaagtttc

SEQ ID NO: 16512 - DNA, 18 bp, Homo sapiens
ttggccgaggctcaagag

SEQ ID NO: 16513 - DNA, 24 bp, Homo sapiens
ttggccgcttcaagatggcggtgc

SEQ ID NO: 16514 - DNA, 16 bp, Homo sapiens
ttggccggtgagtgta

SEQ ID NO: 16515 - DNA, 16 bp, Homo sapiens
ttggcgaaggcttcgc

SEQ ID NO: 16516 - DNA, 16 bp, Homo sapiens
ttggcgcttctgcggc

SEQ ID NO: 16517 - DNA, 19 bp, Homo sapiens
ttggcgggtcggtgagtct

SEQ ID NO: 16518 - DNA, 16 bp, Homo sapiens
ttggcggtggcctttg

SEQ ID NO: 16519 - DNA, 17 bp, Homo sapiens
ttggctaaaagtaaggg

SEQ ID NO: 16520 - DNA, 24 bp, Homo sapiens
ttggctagaaggctgggccggcag

SEQ ID NO: 16521 - DNA, 21 bp, Homo sapiens
ttggctccgtgaggctctgag

SEQ ID NO: 16522 - DNA, 18 bp, Homo sapiens
ttggctgcgaccagcggt

SEQ ID NO: 16523 - DNA, 18 bp, Homo sapiens
ttggctgctcgtagcgcc

SEQ ID NO: 16524 - DNA, 18 bp, Homo sapiens
ttggctgctgggtgcgga

SEQ ID NO: 16525 - DNA, 22 bp, Homo sapiens
ctgggagagctgcagctgccga

SEQ ID NO: 16526 - DNA, 19 bp, Homo sapiens
ctgggagcaacgcgactga

SEQ ID NO: 16527 - DNA, 18 bp, Homo sapiens
ctgggaggacctaggcgg

SEQ ID NO: 16528 - DNA, 20 bp, Homo sapiens
ctgggaggacctaggcggcc

SEQ ID NO: 16529 - DNA, 18 bp, Homo sapiens
ctgggagggcagcgcgct

SEQ ID NO: 16530 - DNA, 18 bp, Homo sapiens
ctgggaggtcggagcttg

SEQ ID NO: 16531 - DNA, 17 bp, Homo sapiens
ctgggagtgaccaagcg

SEQ ID NO: 16532 - DNA, 18 bp, Homo sapiens
ctgggagtggaacagcag

SEQ ID NO: 16533 - DNA, 21 bp, Homo sapiens
ctgggagtgtcgtggacgccg

SEQ ID NO: 16534 - DNA, 23 bp, Homo sapiens
ctgggagtgtcgtggacgccgtg

SEQ ID NO: 16535 - DNA, 19 bp, Homo sapiens
ctgggatggtgagggcggc

SEQ ID NO: 16536 - DNA, 23 bp, Homo sapiens
ctgggcagggccggctgttaatc

SEQ ID NO: 16537 - DNA, 17 bp, Homo sapiens
ctgggccgactggggag

SEQ ID NO: 16538 - DNA, 19 bp, Homo sapiens
ctgggccgggctgggctac

SEQ ID NO: 16539 - DNA, 18 bp, Homo sapiens
ctgggccgtcggagagtg

SEQ ID NO: 16540 - DNA, 21 bp, Homo sapiens
ctgggccgttggcgtcggaag

SEQ ID NO: 16541 - DNA, 17 bp, Homo sapiens
ctgggcgagggtaggcg

SEQ ID NO: 16542 - DNA, 18 bp, Homo sapiens
ctgggcgccaggagagct

SEQ ID NO: 16543 - DNA, 16 bp, Homo sapiens
ctgggcgccgcaggta

SEQ ID NO: 16544 - DNA, 18 bp, Homo sapiens
ctgggcgcggccgtcccg

SEQ ID NO: 16545 - DNA, 17 bp, Homo sapiens
ctgggcggcctgagggg

SEQ ID NO: 16546 - DNA, 18 bp, Homo sapiens
ctgggcgggactgccggg

SEQ ID NO: 16547 - DNA, 19 bp, Homo sapiens
ctgggcggtcgcgttggcg

SEQ ID NO: 16548 - DNA, 18 bp, Homo sapiens
ctgggctcggctggaagc

SEQ ID NO: 16549 - DNA, 18 bp, Homo sapiens
ctgggctgagcagtagtg

SEQ ID NO: 16550 - DNA, 18 bp, Homo sapiens
ctgggctgcaggaggttg

SEQ ID NO: 16551 - DNA, 16 bp, Homo sapiens
ctgggctgccggacgg

SEQ ID NO: 16552 - DNA, 24 bp, Homo sapiens
ctgggctgcgcttgggtccgtcgc

SEQ ID NO: 16553 - DNA, 17 bp, Homo sapiens
ctgggctggacgtggtt

SEQ ID NO: 16554 - DNA, 18 bp, Homo sapiens
ctgggctggacgtggttt

SEQ ID NO: 16555 - DNA, 20 bp, Homo sapiens
ctgggctggacgtggttttg

SEQ ID NO: 16556 - DNA, 16 bp, Homo sapiens
ctgggctggtcccgca

SEQ ID NO: 16557 - DNA, 20 bp, Homo sapiens
ctgggcttccgtcctccgcc

SEQ ID NO: 16558 - DNA, 18 bp, Homo sapiens
ctggggacagttcactca

SEQ ID NO: 16559 - DNA, 18 bp, Homo sapiens
ctggggacgggggccgag

SEQ ID NO: 16560 - DNA, 17 bp, Homo sapiens
ctggggactcgagctca

SEQ ID NO: 16561 - DNA, 21 bp, Homo sapiens
ctggggagggcgaggcggagg

SEQ ID NO: 16562 - DNA, 18 bp, Homo sapiens
ctggggagtcgcgattcg

SEQ ID NO: 16563 - DNA, 18 bp, Homo sapiens
ctggggcagccagcacaa

SEQ ID NO: 16564 - DNA, 17 bp, Homo sapiens
ctggggcaggttatggt

SEQ ID NO: 16565 - DNA, 18 bp, Homo sapiens
ctggggcaggttatggta

SEQ ID NO: 16566 - DNA, 20 bp, Homo sapiens
ctggggcagtctctgcatat

SEQ ID NO: 16567 - DNA, 18 bp, Homo sapiens
ctggggcgcacagggtcg

SEQ ID NO: 16568 - DNA, 18 bp, Homo sapiens
ctggggcgccgccggcgg

SEQ ID NO: 16569 - DNA, 18 bp, Homo sapiens
ctggggcggtgtccgggg

SEQ ID NO: 16570 - DNA, 19 bp, Homo sapiens
ctggggcgtgcgtgaggcg

SEQ ID NO: 16571 - DNA, 23 bp, Homo sapiens
ctggggcttttgacttctccccg

SEQ ID NO: 16572 - DNA, 16 bp, Homo sapiens
ctgggggcgaggggtg

SEQ ID NO: 16573 - DNA, 20 bp, Homo sapiens
ctgggggcggaggaggcgaa

SEQ ID NO: 16574 - DNA, 20 bp, Homo sapiens
ctggggtcccggctgccctg

SEQ ID NO: 16575 - DNA, 18 bp, Homo sapiens
ctgggtaagtgagacggc

SEQ ID NO: 16576 - DNA, 17 bp, Homo sapiens
ctgggtactacagcaga

SEQ ID NO: 16577 - DNA, 19 bp, Homo sapiens
ctgggtaggcgacccggac

SEQ ID NO: 16578 - DNA, 18 bp, Homo sapiens
ctgggtcccatcgcccca

SEQ ID NO: 16579 - DNA, 21 bp, Homo sapiens
ctgggtcgctcgggtcggctt

SEQ ID NO: 16580 - DNA, 19 bp, Homo sapiens
ctgggtcgggcggatcctc

SEQ ID NO: 16581 - DNA, 18 bp, Homo sapiens
ctgggtgcccagaaaggc

SEQ ID NO: 16582 - DNA, 18 bp, Homo sapiens
ttggctgctgtcgcctgc

SEQ ID NO: 16583 - DNA, 18 bp, Homo sapiens
ttggctggagagtttgtg

SEQ ID NO: 16584 - DNA, 19 bp, Homo sapiens
ttggctggccggtgtatgt

SEQ ID NO: 16585 - DNA, 22 bp, Homo sapiens
ttggctgtctgaagatagatcg

SEQ ID NO: 16586 - DNA, 17 bp, Homo sapiens
ttggctgtgtgaggaag

SEQ ID NO: 16587 - DNA, 16 bp, Homo sapiens
ttgggaccggagggtg

SEQ ID NO: 16588 - DNA, 18 bp, Homo sapiens
ttgggaggagcagcggcc

SEQ ID NO: 16589 - DNA, 23 bp, Homo sapiens
ttgggaggctccgttgcctgctc

SEQ ID NO: 16590 - DNA, 18 bp, Homo sapiens
ttgggccggaggaaagcg

SEQ ID NO: 16591 - DNA, 16 bp, Homo sapiens
ttgggccgggcagggc

SEQ ID NO: 16592 - DNA, 18 bp, Homo sapiens
ttgggcggcggcggttcc

SEQ ID NO: 16593 - DNA, 18 bp, Homo sapiens
ttgggcggtgctggtttt

SEQ ID NO: 16594 - DNA, 20 bp, Homo sapiens
ttgggcgttggaccccgcat

SEQ ID NO: 16595 - DNA, 22 bp, Homo sapiens
ttgggctcaggaggaaaggacc

SEQ ID NO: 16596 - DNA, 17 bp, Homo sapiens
ttgggctgcaggtaggt

SEQ ID NO: 16597 - DNA, 18 bp, Homo sapiens
ttgggctgcaggtaggtg

SEQ ID NO: 16598 - DNA, 22 bp, Homo sapiens
ttgggctgctggagtgcggcgc

SEQ ID NO: 16599 - DNA, 18 bp, Homo sapiens
ttgggctgtgtgtgcgac

SEQ ID NO: 16600 - DNA, 16 bp, Homo sapiens
ttgggcttcgcttcca

SEQ ID NO: 16601 - DNA, 17 bp, Homo sapiens
ttgggctttgcacccgg

SEQ ID NO: 16602 - DNA, 19 bp, Homo sapiens
ttggggcccggctctcgaa

SEQ ID NO: 16603 - DNA, 19 bp, Homo sapiens
ttgggggcgtgcgcagtcg

SEQ ID NO: 16604 - DNA, 19 bp, Homo sapiens
ttggggggctgtgtgagtc

SEQ ID NO: 16605 - DNA, 22 bp, Homo sapiens
ttgggggttcgctcgagcctca

SEQ ID NO: 16606 - DNA, 19 bp, Homo sapiens
ttggggttcaattaaaacc

SEQ ID NO: 16607 - DNA, 18 bp, Homo sapiens
ttgggtgccggtggagtc

SEQ ID NO: 16608 - DNA, 18 bp, Homo sapiens
ttgggtggcggttgactg

SEQ ID NO: 16609 - DNA, 22 bp, Homo sapiens
ttggtcgctgtggcagcggctg

SEQ ID NO: 16610 - DNA, 17 bp, Homo sapiens
ttggtcggtgggttccc

SEQ ID NO: 16611 - DNA, 18 bp, Homo sapiens
ttggtctcaatggcagag

SEQ ID NO: 16612 - DNA, 18 bp, Homo sapiens
ttggtgctcagagtgtgg

SEQ ID NO: 16613 - DNA, 21 bp, Homo sapiens
ttggtgctcagagtgtggtca

SEQ ID NO: 16614 - DNA, 21 bp, Homo sapiens
ttggtggtctgaattgagaag

SEQ ID NO: 16615 - DNA, 19 bp, Homo sapiens
ttggtgtgcgggtttcggt

SEQ ID NO: 16616 - DNA, 20 bp, Homo sapiens
ttggtgtggagcacaggcag

SEQ ID NO: 16617 - DNA, 20 bp, Homo sapiens
ttggtgtttcgctgggccct

SEQ ID NO: 16618 - DNA, 17 bp, Homo sapiens
ttggttccggccgcacc

SEQ ID NO: 16619 - DNA, 18 bp, Homo sapiens
ttggtttccgggtcggtt

SEQ ID NO: 16620 - DNA, 21 bp, Homo sapiens
ttgtaagtaacgccgcggacc

SEQ ID NO: 16621 - DNA, 19 bp, Homo sapiens
ttgtaggaccggcgaggaa

SEQ ID NO: 16622 - DNA, 17 bp, Homo sapiens
ttgtaggggcgaaggtg

SEQ ID NO: 16623 - DNA, 18 bp, Homo sapiens
ttgtaggtaatggcaggc

SEQ ID NO: 16624 - DNA, 23 bp, Homo sapiens
ttgtagtcctggacccgaaggtg

SEQ ID NO: 16625 - DNA, 16 bp, Homo sapiens
ttgtcacccaggaacc

SEQ ID NO: 16626 - DNA, 18 bp, Homo sapiens
ttgtcaggggaacgggcc

SEQ ID NO: 16627 - DNA, 17 bp, Homo sapiens
ttgtcagtcggcgccgc

SEQ ID NO: 16628 - DNA, 16 bp, Homo sapiens
ttgtcatacgacttgc

SEQ ID NO: 16629 - DNA, 19 bp, Homo sapiens
ttgtcctgccagggtagaa

SEQ ID NO: 16630 - DNA, 18 bp, Homo sapiens
ttgtcgaagctagaggac

SEQ ID NO: 16631 - DNA, 20 bp, Homo sapiens
ttgtcgacgccgctgccacc

SEQ ID NO: 16632 - DNA, 20 bp, Homo sapiens
ttgtcgcagcgggttttcct

SEQ ID NO: 16633 - DNA, 17 bp, Homo sapiens
ttgtcgcggggaagctg

SEQ ID NO: 16634 - DNA, 18 bp, Homo sapiens
ttgtcggccgccgtagcc

SEQ ID NO: 16635 - DNA, 17 bp, Homo sapiens
ttgtcgggtgtcatggg

SEQ ID NO: 16636 - DNA, 17 bp, Homo sapiens
ttgtctcggcggcgctg

SEQ ID NO: 16637 - DNA, 19 bp, Homo sapiens
ttgtcttttctgtcttatc

SEQ ID NO: 16638 - DNA, 19 bp, Homo sapiens
ttgtgaaaagttgtgagcc

SEQ ID NO: 16639 - DNA, 16 bp, Homo sapiens
ctgggttgtacccggc

SEQ ID NO: 16640 - DNA, 22 bp, Homo sapiens
ctggtaagaaagggactcaggg

SEQ ID NO: 16641 - DNA, 16 bp, Homo sapiens
ctggtaagtggaactc

SEQ ID NO: 16642 - DNA, 19 bp, Homo sapiens
ctggtagaggcaaaggtgg

SEQ ID NO: 16643 - DNA, 18 bp, Homo sapiens
ctggtatctaatcgtcgc

SEQ ID NO: 16644 - DNA, 18 bp, Homo sapiens
ctggtccggaggtagcgg

SEQ ID NO: 16645 - DNA, 23 bp, Homo sapiens
ctggtctggaggcgcgaagtagg

SEQ ID NO: 16646 - DNA, 17 bp, Homo sapiens
ctggtgaatgtgagtac

SEQ ID NO: 16647 - DNA, 18 bp, Homo sapiens
ctggtgagaaattgagag

SEQ ID NO: 16648 - DNA, 18 bp, Homo sapiens
ctggtgaggagtagaggc

SEQ ID NO: 16649 - DNA, 18 bp, Homo sapiens
ctggtgccagggaacagg

SEQ ID NO: 16650 - DNA, 18 bp, Homo sapiens
ctggtgcctgggagcggc

SEQ ID NO: 16651 - DNA, 16 bp, Homo sapiens
ctggtgcggagactgc

SEQ ID NO: 16652 - DNA, 20 bp, Homo sapiens
ctggtggccggcggcgcccg

SEQ ID NO: 16653 - DNA, 18 bp, Homo sapiens
ctggtggcggagttaaag

SEQ ID NO: 16654 - DNA, 18 bp, Homo sapiens
ctggtggcgtcggcaggt

SEQ ID NO: 16655 - DNA, 18 bp, Homo sapiens
ctggtgggccgcgtcgaa

SEQ ID NO: 16656 - DNA, 18 bp, Homo sapiens
ctggtggtccagggaagc

SEQ ID NO: 16657 - DNA, 18 bp, Homo sapiens
ctggtgtgaggggaacct

SEQ ID NO: 16658 - DNA, 19 bp, Homo sapiens
ctggttatcgggagttgga

SEQ ID NO: 16659 - DNA, 19 bp, Homo sapiens
ctggttcggagaagcagcg

SEQ ID NO: 16660 - DNA, 17 bp, Homo sapiens
ctggttgtgggagagtt

SEQ ID NO: 16661 - DNA, 18 bp, Homo sapiens
ctggttgtgggagagttc

SEQ ID NO: 16662 - DNA, 18 bp, Homo sapiens
ctgtaaacaaggtgtgca

SEQ ID NO: 16663 - DNA, 20 bp, Homo sapiens
ctgtaacgacggtaggttct

SEQ ID NO: 16664 - DNA, 24 bp, Homo sapiens
ctgtaaggaggtggcagggacaac

SEQ ID NO: 16665 - DNA, 18 bp, Homo sapiens
ctgtaaggccgaggttgc

SEQ ID NO: 16666 - DNA, 20 bp, Homo sapiens
ctgtaatgctgagacagact

SEQ ID NO: 16667 - DNA, 18 bp, Homo sapiens
ctgtaccagggcggcgcg

SEQ ID NO: 16668 - DNA, 18 bp, Homo sapiens
ctgtactgtgtggcgcct

SEQ ID NO: 16669 - DNA, 18 bp, Homo sapiens
ctgtactttttagagcga

SEQ ID NO: 16670 - DNA, 17 bp, Homo sapiens
ctgtagccggagtggag

SEQ ID NO: 16671 - DNA, 21 bp, Homo sapiens
ctgtagcgaagagagtttggc

SEQ ID NO: 16672 - DNA, 18 bp, Homo sapiens
ctgtagcggggctgtagc

SEQ ID NO: 16673 - DNA, 18 bp, Homo sapiens
ctgtagttggaggacggg

SEQ ID NO: 16674 - DNA, 18 bp, Homo sapiens
ctgtatcagaggtggcgg

SEQ ID NO: 16675 - DNA, 18 bp, Homo sapiens
ctgtatgatcttcggagc

SEQ ID NO: 16676 - DNA, 19 bp, Homo sapiens
ctgtattgaagtgggctgt

SEQ ID NO: 16677 - DNA, 20 bp, Homo sapiens
ctgtattgaagtgggctgtg

SEQ ID NO: 16678 - DNA, 18 bp, Homo sapiens
ctgtcactgtggaaacgg

SEQ ID NO: 16679 - DNA, 20 bp, Homo sapiens
ctgtcacttctcaaagcatc

SEQ ID NO: 16680 - DNA, 17 bp, Homo sapiens
ctgtcagtgcgaggcgg

SEQ ID NO: 16681 - DNA, 19 bp, Homo sapiens
ctgtcatcatgtcgcgtta

SEQ ID NO: 16682 - DNA, 16 bp, Homo sapiens
ctgtccaaccaaacag

SEQ ID NO: 16683 - DNA, 18 bp, Homo sapiens
ctgtcccatttacccgac

SEQ ID NO: 16684 - DNA, 18 bp, Homo sapiens
ctgtccgcgagctgtcag

SEQ ID NO: 16685 - DNA, 21 bp, Homo sapiens
ctgtcctcggagcaggcggag

SEQ ID NO: 16686 - DNA, 16 bp, Homo sapiens
ctgtccttcctcccgg

SEQ ID NO: 16687 - DNA, 18 bp, Homo sapiens
ctgtcgagcagcggacgc

SEQ ID NO: 16688 - DNA, 18 bp, Homo sapiens
ctgtcgccccgcctgtgc

SEQ ID NO: 16689 - DNA, 19 bp, Homo sapiens
ctgtcggaaggtggcgagc

SEQ ID NO: 16690 - DNA, 18 bp, Homo sapiens
ctgtcggtcttggagcga

SEQ ID NO: 16691 - DNA, 18 bp, Homo sapiens
ctgtctgactgatggtcc

SEQ ID NO: 16692 - DNA, 20 bp, Homo sapiens
ctgtctgggctgagcagtag

SEQ ID NO: 16693 - DNA, 19 bp, Homo sapiens
ctgtctgtgtgtgagtgca

SEQ ID NO: 16694 - DNA, 19 bp, Homo sapiens
ctgtgaattcggtgaggaa

SEQ ID NO: 16695 - DNA, 18 bp, Homo sapiens
ctgtgacgctgctgctgg

SEQ ID NO: 16696 - DNA, 18 bp, Homo sapiens
ttgtgaaactggaaggct

SEQ ID NO: 16697 - DNA, 19 bp, Homo sapiens
ttgtgacagaagtgcgact

SEQ ID NO: 16698 - DNA, 17 bp, Homo sapiens
ttgtgatcggaggagag

SEQ ID NO: 16699 - DNA, 15 bp, Homo sapiens
ttgtgcggcgcgcgc

SEQ ID NO: 16700 - DNA, 17 bp, Homo sapiens
ttgtgcggctgcagcgg

SEQ ID NO: 16701 - DNA, 16 bp, Homo sapiens
ttgtggagatcggatc

SEQ ID NO: 16702 - DNA, 18 bp, Homo sapiens
ttgtggagatcggatctt

SEQ ID NO: 16703 - DNA, 18 bp, Homo sapiens
ttgtggagtggcgtagac

SEQ ID NO: 16704 - DNA, 19 bp, Homo sapiens
ttgtggagtggcgtagacg

SEQ ID NO: 16705 - DNA, 21 bp, Homo sapiens
ttgtggagtggcgtagacgag

SEQ ID NO: 16706 - DNA, 18 bp, Homo sapiens
ttgtgggatggcggagtt

SEQ ID NO: 16707 - DNA, 17 bp, Homo sapiens
ttgtggttggtgtgcgg

SEQ ID NO: 16708 - DNA, 18 bp, Homo sapiens
ttgtgtgttagagaacgt

SEQ ID NO: 16709 - DNA, 18 bp, Homo sapiens
ttgtgttcgcagccttgc

SEQ ID NO: 16710 - DNA, 18 bp, Homo sapiens
ttgttacgaagctgcagg

SEQ ID NO: 16711 - DNA, 16 bp, Homo sapiens
ttgttactcaggtgcg

SEQ ID NO: 16712 - DNA, 17 bp, Homo sapiens
ttgttactcaggtgcgc

SEQ ID NO: 16713 - DNA, 18 bp, Homo sapiens
ttgttcgcagaggaagcc

SEQ ID NO: 16714 - DNA, 18 bp, Homo sapiens
ttgttgcggcgggtttcg

SEQ ID NO: 16715 - DNA, 19 bp, Homo sapiens
ttgttgttggtgcgcgacg

SEQ ID NO: 16716 - DNA, 20 bp, Homo sapiens
ttgttgttggtgcgcgacgc

SEQ ID NO: 16717 - DNA, 18 bp, Homo sapiens
ttgtttgggctgtcgctg

SEQ ID NO: 16718 - DNA, 18 bp, Homo sapiens
ttgtttggtcagaagggg

SEQ ID NO: 16719 - DNA, 16 bp, Homo sapiens
ttgtttgtttgagtga

SEQ ID NO: 16720 - DNA, 18 bp, Homo sapiens
tttaaccattacctaaat

SEQ ID NO: 16721 - DNA, 18 bp, Homo sapiens
tttaagttcgtgaatgca

SEQ ID NO: 16722 - DNA, 19 bp, Homo sapiens
tttacaaaggccccgggcg

SEQ ID NO: 16723 - DNA, 20 bp, Homo sapiens
tttacccggacgaaagacac

SEQ ID NO: 16724 - DNA, 19 bp, Homo sapiens
tttacggaagttctttccc

SEQ ID NO: 16725 - DNA, 18 bp, Homo sapiens
tttactatggcggttgga

SEQ ID NO: 16726 - DNA, 20 bp, Homo sapiens
tttagccgcccgtctttgta

SEQ ID NO: 16727 - DNA, 18 bp, Homo sapiens
tttagctgttggttccgg

SEQ ID NO: 16728 - DNA, 18 bp, Homo sapiens
tttaggcgtgcgaggagg

SEQ ID NO: 16729 - DNA, 19 bp, Homo sapiens
tttagtctgaggcgaagct

SEQ ID NO: 16730 - DNA, 16 bp, Homo sapiens
tttcaaccttgtcaac

SEQ ID NO: 16731 - DNA, 18 bp, Homo sapiens
tttcactctgacgggccc

SEQ ID NO: 16732 - DNA, 18 bp, Homo sapiens
tttcagaagcgcgatccc

SEQ ID NO: 16733 - DNA, 18 bp, Homo sapiens
tttcagacggtgaggacc

SEQ ID NO: 16734 - DNA, 19 bp, Homo sapiens
tttcagacttcagaaggac

SEQ ID NO: 16735 - DNA, 21 bp, Homo sapiens
tttcagacttcagaaggacac

SEQ ID NO: 16736 - DNA, 20 bp, Homo sapiens
tttcagggagcttgtcgacg

SEQ ID NO: 16737 - DNA, 18 bp, Homo sapiens
tttcagtcgggcgctgag

SEQ ID NO: 16738 - DNA, 17 bp, Homo sapiens
tttcatctctatggctg

SEQ ID NO: 16739 - DNA, 18 bp, Homo sapiens
tttcccatcttgcaaggt

SEQ ID NO: 16740 - DNA, 18 bp, Homo sapiens
tttccccggcggcgtctc

SEQ ID NO: 16741 - DNA, 20 bp, Homo sapiens
tttcccgcgcgggctacctc

SEQ ID NO: 16742 - DNA, 18 bp, Homo sapiens
tttccgcctcactcgttg

SEQ ID NO: 16743 - DNA, 16 bp, Homo sapiens
tttccggcgcgccggc

SEQ ID NO: 16744 - DNA, 19 bp, Homo sapiens
tttccggcggtgacgacct

SEQ ID NO: 16745 - DNA, 19 bp, Homo sapiens
tttccgggacaacatggcg

SEQ ID NO: 16746 - DNA, 18 bp, Homo sapiens
tttccggggtcacgggaa

SEQ ID NO: 16747 - DNA, 20 bp, Homo sapiens
tttccggttccggctgcggg

SEQ ID NO: 16748 - DNA, 21 bp, Homo sapiens
tttccgtctggtgaggggtta

SEQ ID NO: 16749 - DNA, 18 bp, Homo sapiens
tttccgtgcacgtaaaag

SEQ ID NO: 16750 - DNA, 17 bp, Homo sapiens
tttcctcgcgttcttga

SEQ ID NO: 16751 - DNA, 18 bp, Homo sapiens
tttcctggcttcggacct

SEQ ID NO: 16752 - DNA, 19 bp, Homo sapiens
tttcgacgctggcggtgga

SEQ ID NO: 16753 - DNA, 17 bp, Homo sapiens
ctgtgagcgcagggcta

SEQ ID NO: 16754 - DNA, 20 bp, Homo sapiens
ctgtgagctgcgcctgacgg

SEQ ID NO: 16755 - DNA, 19 bp, Homo sapiens
ctgtgaggtagcggcggca

SEQ ID NO: 16756 - DNA, 20 bp, Homo sapiens
ctgtgcgaaccagacccggc

SEQ ID NO: 16757 - DNA, 18 bp, Homo sapiens
ctgtgcgctgagtcggag

SEQ ID NO: 16758 - DNA, 21 bp, Homo sapiens
ctgtgcgcttggggagcgcgg

SEQ ID NO: 16759 - DNA, 20 bp, Homo sapiens
ctgtgcggagcaaggcggtg

SEQ ID NO: 16760 - DNA, 21 bp, Homo sapiens
ctgtgctgtttttccgtcatg

SEQ ID NO: 16761 - DNA, 20 bp, Homo sapiens
ctgtggagggcgagctgagc

SEQ ID NO: 16762 - DNA, 19 bp, Homo sapiens
ctgtggccggcgtggatga

SEQ ID NO: 16763 - DNA, 18 bp, Homo sapiens
ctgtggccggctcggagc

SEQ ID NO: 16764 - DNA, 19 bp, Homo sapiens
ctgtgggacgtggtggtag

SEQ ID NO: 16765 - DNA, 22 bp, Homo sapiens
ctgtgggcccctccgggaggtc

SEQ ID NO: 16766 - DNA, 17 bp, Homo sapiens
ctgtgggggcggggtca

SEQ ID NO: 16767 - DNA, 17 bp, Homo sapiens
ctgtgggtacccggagc

SEQ ID NO: 16768 - DNA, 18 bp, Homo sapiens
ctgtggtcccaaggcgcg

SEQ ID NO: 16769 - DNA, 21 bp, Homo sapiens
ctgtgtcagatcagggatcat

SEQ ID NO: 16770 - DNA, 20 bp, Homo sapiens
ctgtgtgaagagtgccagtg

SEQ ID NO: 16771 - DNA, 18 bp, Homo sapiens
ctgtgtgtaggagggatt

SEQ ID NO: 16772 - DNA, 19 bp, Homo sapiens
ctgtgtgtcggaaagatgg

SEQ ID NO: 16773 - DNA, 17 bp, Homo sapiens
ctgtgtgtctcgggcgt

SEQ ID NO: 16774 - DNA, 18 bp, Homo sapiens
ctgtgtgtggacggaatt

SEQ ID NO: 16775 - DNA, 21 bp, Homo sapiens
ctgttaagggggccgccatgg

SEQ ID NO: 16776 - DNA, 18 bp, Homo sapiens
ctgttagtcgggtaggca

SEQ ID NO: 16777 - DNA, 23 bp, Homo sapiens
ctgttcaacctgaagttcgcggc

SEQ ID NO: 16778 - DNA, 19 bp, Homo sapiens
ctgttccttttggtacgct

SEQ ID NO: 16779 - DNA, 22 bp, Homo sapiens
ctgttctagtgtttgagccgtc

SEQ ID NO: 16780 - DNA, 21 bp, Homo sapiens
ctgttcttcctgggggactgg

SEQ ID NO: 16781 - DNA, 20 bp, Homo sapiens
ctgttgactgcgtcgcgatg

SEQ ID NO: 16782 - DNA, 16 bp, Homo sapiens
ctgttgcaatggcgag

SEQ ID NO: 16783 - DNA, 22 bp, Homo sapiens
ctgttgcaatggcgagctaagc

SEQ ID NO: 16784 - DNA, 18 bp, Homo sapiens
ctgttggccatggcgggc

SEQ ID NO: 16785 - DNA, 18 bp, Homo sapiens
ctgttggtgctcagagtg

SEQ ID NO: 16786 - DNA, 20 bp, Homo sapiens
ctgtttgtggagccggcggg

SEQ ID NO: 16787 - DNA, 16 bp, Homo sapiens
cttaagggcgggagtc

SEQ ID NO: 16788 - DNA, 16 bp, Homo sapiens
cttaatgaggaccaca

SEQ ID NO: 16789 - DNA, 18 bp, Homo sapiens
cttaatgttgggcttcat

SEQ ID NO: 16790 - DNA, 22 bp, Homo sapiens
cttacacttcatgtctcctagc

SEQ ID NO: 16791 - DNA, 17 bp, Homo sapiens
cttacggcgccggagag

SEQ ID NO: 16792 - DNA, 18 bp, Homo sapiens
cttactgcgggacggcct

SEQ ID NO: 16793 - DNA, 19 bp, Homo sapiens
cttagagggagcggggagt

SEQ ID NO: 16794 - DNA, 18 bp, Homo sapiens
cttagctgttagctgaga

SEQ ID NO: 16795 - DNA, 19 bp, Homo sapiens
cttagctttctcccgaacg

SEQ ID NO: 16796 - DNA, 20 bp, Homo sapiens
cttagctttctcccgaacgc

SEQ ID NO: 16797 - DNA, 18 bp, Homo sapiens
cttaggagctgaagatcg

SEQ ID NO: 16798 - DNA, 18 bp, Homo sapiens
cttaggcggagcgaagag

SEQ ID NO: 16799 - DNA, 17 bp, Homo sapiens
cttcacgagaagccagg

SEQ ID NO: 16800 - DNA, 19 bp, Homo sapiens
cttcacttctgcaattgcc

SEQ ID NO: 16801 - DNA, 18 bp, Homo sapiens
cttcagagaagggaaaca

SEQ ID NO: 16802 - DNA, 19 bp, Homo sapiens
cttcagagaagggaaacac

SEQ ID NO: 16803 - DNA, 17 bp, Homo sapiens
cttcagccagtgggctc

SEQ ID NO: 16804 - DNA, 22 bp, Homo sapiens
cttcagccgcagtcgccactgg

SEQ ID NO: 16805 - DNA, 17 bp, Homo sapiens
cttcaggcgtcggcagc

SEQ ID NO: 16806 - DNA, 18 bp, Homo sapiens
cttcagtttgttggctgc

SEQ ID NO: 16807 - DNA, 24 bp, Homo sapiens
cttcattgcttaacatcgttttta

SEQ ID NO: 16808 - DNA, 21 bp, Homo sapiens
cttccagggactacaggaggc

SEQ ID NO: 16809 - DNA, 19 bp, Homo sapiens
cttccagggtcggggagac

SEQ ID NO: 16810 - DNA, 18 bp, Homo sapiens
tttcgcccgccgttccgt

SEQ ID NO: 16811 - DNA, 19 bp, Homo sapiens
tttcggagtccggtactgg

SEQ ID NO: 16812 - DNA, 18 bp, Homo sapiens
tttcggcggcttcagtgc

SEQ ID NO: 16813 - DNA, 20 bp, Homo sapiens
tttcgggaacctcagtccca

SEQ ID NO: 16814 - DNA, 15 bp, Homo sapiens
tttcgggcggcgcgg

SEQ ID NO: 16815 - DNA, 19 bp, Homo sapiens
tttcgtcctgggatgcgga

SEQ ID NO: 16816 - DNA, 20 bp, Homo sapiens
tttcgttggtgtgttggtca

SEQ ID NO: 16817 - DNA, 23 bp, Homo sapiens
tttctaggagcttcgctatgcgg

SEQ ID NO: 16818 - DNA, 17 bp, Homo sapiens
tttctcaactatggccc

SEQ ID NO: 16819 - DNA, 16 bp, Homo sapiens
tttctcccgaacgcca

SEQ ID NO: 16820 - DNA, 20 bp, Homo sapiens
tttctcctccccctcccggc

SEQ ID NO: 16821 - DNA, 16 bp, Homo sapiens
tttctcgactccatct

SEQ ID NO: 16822 - DNA, 18 bp, Homo sapiens
tttctcgactccatcttc

SEQ ID NO: 16823 - DNA, 20 bp, Homo sapiens
tttctctatcagtcgcgcag

SEQ ID NO: 16824 - DNA, 18 bp, Homo sapiens
tttctctggcagtaggca

SEQ ID NO: 16825 - DNA, 19 bp, Homo sapiens
tttctggagccgcacctcc

SEQ ID NO: 16826 - DNA, 16 bp, Homo sapiens
tttctgggaagacaaa

SEQ ID NO: 16827 - DNA, 18 bp, Homo sapiens
tttctgtctagctccgac

SEQ ID NO: 16828 - DNA, 18 bp, Homo sapiens
tttctgttttctactaac

SEQ ID NO: 16829 - DNA, 18 bp, Homo sapiens
tttcttccgcacggttgg

SEQ ID NO: 16830 - DNA, 17 bp, Homo sapiens
tttcttggctaagccgc

SEQ ID NO: 16831 - DNA, 19 bp, Homo sapiens
tttctttatcctgcagtct

SEQ ID NO: 16832 - DNA, 18 bp, Homo sapiens
tttgaagggaggtagcat

SEQ ID NO: 16833 - DNA, 20 bp, Homo sapiens
tttgagtgagtcggcgatcg

SEQ ID NO: 16834 - DNA, 22 bp, Homo sapiens
tttgattacccgccgccagcta

SEQ ID NO: 16835 - DNA, 19 bp, Homo sapiens
tttgccggagtcgagcggg

SEQ ID NO: 16836 - DNA, 14 bp, Homo sapiens
tttgcgagtggcgg

SEQ ID NO: 16837 - DNA, 18 bp, Homo sapiens
tttgcgctttctcttagt

SEQ ID NO: 16838 - DNA, 17 bp, Homo sapiens
tttgcgggcgggaagca

SEQ ID NO: 16839 - DNA, 17 bp, Homo sapiens
tttgctcctgcgattat

SEQ ID NO: 16840 - DNA, 18 bp, Homo sapiens
tttgctgcgtctactgcg

SEQ ID NO: 16841 - DNA, 17 bp, Homo sapiens
tttgctggagcctgcga

SEQ ID NO: 16842 - DNA, 18 bp, Homo sapiens
tttgctgggtaggcgacc

SEQ ID NO: 16843 - DNA, 19 bp, Homo sapiens
tttggaaggaggaaggggg

SEQ ID NO: 16844 - DNA, 18 bp, Homo sapiens
tttggagtaagaatggcc

SEQ ID NO: 16845 - DNA, 24 bp, Homo sapiens
tttgggagtttttagagacgagtt

SEQ ID NO: 16846 - DNA, 18 bp, Homo sapiens
tttggtaagtaggaaagt

SEQ ID NO: 16847 - DNA, 18 bp, Homo sapiens
tttggtggggagggtcgg

SEQ ID NO: 16848 - DNA, 17 bp, Homo sapiens
tttgtaagaggcacatt

SEQ ID NO: 16849 - DNA, 17 bp, Homo sapiens
tttgtaaggagaccact

SEQ ID NO: 16850 - DNA, 20 bp, Homo sapiens
tttgtcccagtcagtccgga

SEQ ID NO: 16851 - DNA, 19 bp, Homo sapiens
tttgtcgacgccgctgcca

SEQ ID NO: 16852 - DNA, 18 bp, Homo sapiens
tttgtgaaaagttgtgag

SEQ ID NO: 16853 - DNA, 19 bp, Homo sapiens
tttgttgcgaggttctgag

SEQ ID NO: 16854 - DNA, 18 bp, Homo sapiens
tttgtttgttttcctgcc

SEQ ID NO: 16855 - DNA, 16 bp, Homo sapiens
tttgttttgcttcgag

SEQ ID NO: 16856 - DNA, 17 bp, Homo sapiens
ttttaaaagaagggatg

SEQ ID NO: 16857 - DNA, 20 bp, Homo sapiens
ttttaaatcggtacaagatg

SEQ ID NO: 16858 - DNA, 20 bp, Homo sapiens
ttttagaagttgcttagtca

SEQ ID NO: 16859 - DNA, 17 bp, Homo sapiens
ttttagccgtaatgtca

SEQ ID NO: 16860 - DNA, 18 bp, Homo sapiens
ttttagtttcctccgccc

SEQ ID NO: 16861 - DNA, 17 bp, Homo sapiens
ttttcaagctcttgcat

SEQ ID NO: 16862 - DNA, 19 bp, Homo sapiens
ttttcctcggttcccagtg

SEQ ID NO: 16863 - DNA, 21 bp, Homo sapiens
ttttcgcaacgggtttgccgc

SEQ ID NO: 16864 - DNA, 19 bp, Homo sapiens
ttttcggaacagcagagac

SEQ ID NO: 16865 - DNA, 18 bp, Homo sapiens
ttttctcagccaggcggc

SEQ ID NO: 16866 - DNA, 21 bp, Homo sapiens
ttttctctctctctttcactg

SEQ ID NO: 16867 - DNA, 16 bp, Homo sapiens
cttccatgcgaccgcc

SEQ ID NO: 16868 - DNA, 18 bp, Homo sapiens
cttccgccctcgcgggac

SEQ ID NO: 16869 - DNA, 17 bp, Homo sapiens
cttccggagcagcatgg

SEQ ID NO: 16870 - DNA, 18 bp, Homo sapiens
cttccggcggtgggactg

SEQ ID NO: 16871 - DNA, 19 bp, Homo sapiens
cttccggcgtccgtcgggc

SEQ ID NO: 16872 - DNA, 18 bp, Homo sapiens
cttccggtgcggaggtca

SEQ ID NO: 16873 - DNA, 22 bp, Homo sapiens
cttccggttcccagactgaatt

SEQ ID NO: 16874 - DNA, 20 bp, Homo sapiens
cttcctcgttgcccccgccg

SEQ ID NO: 16875 - DNA, 22 bp, Homo sapiens
cttcctctttttccggctggaa

SEQ ID NO: 16876 - DNA, 16 bp, Homo sapiens
cttcctgctgcgggaa

SEQ ID NO: 16877 - DNA, 17 bp, Homo sapiens
cttcctggagacaccgc

SEQ ID NO: 16878 - DNA, 18 bp, Homo sapiens
cttcctgtactttttaga

SEQ ID NO: 16879 - DNA, 17 bp, Homo sapiens
cttccttcttctcttcc

SEQ ID NO: 16880 - DNA, 18 bp, Homo sapiens
cttcctttttgtccgaca

SEQ ID NO: 16881 - DNA, 20 bp, Homo sapiens
cttcctttttgtccgacatc

SEQ ID NO: 16882 - DNA, 21 bp, Homo sapiens
cttcgactccaacgccttcac

SEQ ID NO: 16883 - DNA, 16 bp, Homo sapiens
cttcgagccatggcgg

SEQ ID NO: 16884 - DNA, 18 bp, Homo sapiens
cttcgcgcagggatggag

SEQ ID NO: 16885 - DNA, 18 bp, Homo sapiens
cttcggagagactgcctc

SEQ ID NO: 16886 - DNA, 17 bp, Homo sapiens
cttcggagcctgctgca

SEQ ID NO: 16887 - DNA, 19 bp, Homo sapiens
cttcggagcgggagtgttc

SEQ ID NO: 16888 - DNA, 18 bp, Homo sapiens
cttcggcggcgccacgag

SEQ ID NO: 16889 - DNA, 17 bp, Homo sapiens
cttcgggacccaggacc

SEQ ID NO: 16890 - DNA, 20 bp, Homo sapiens
cttcgtcgcttcggccagtg

SEQ ID NO: 16891 - DNA, 20 bp, Homo sapiens
ttttctggaacttacttatg

SEQ ID NO: 16892 - DNA, 20 bp, Homo sapiens
ttttctgtccaaccaaacag

SEQ ID NO: 16893 - DNA, 19 bp, Homo sapiens
ttttgactgagcaacccta

SEQ ID NO: 16894 - DNA, 17 bp, Homo sapiens
ttttgagctggtgactg

SEQ ID NO: 16895 - DNA, 20 bp, Homo sapiens
ttttgccggagtcgagcggg

SEQ ID NO: 16896 - DNA, 18 bp, Homo sapiens
ttttgcgggctgccgtac

SEQ ID NO: 16897 - DNA, 17 bp, Homo sapiens
ttttgctccgcccggcc

SEQ ID NO: 16898 - DNA, 19 bp, Homo sapiens
ttttgctgggtaggcgacc

SEQ ID NO: 16899 - DNA, 18 bp, Homo sapiens
ttttggacaccacaccta

SEQ ID NO: 16900 - DNA, 20 bp, Homo sapiens
ttttggcacactccgggagg

SEQ ID NO: 16901 - DNA, 19 bp, Homo sapiens
ttttggcggcagcggcgac

SEQ ID NO: 16902 - DNA, 17 bp, Homo sapiens
ttttggtgcgagagaaa

SEQ ID NO: 16903 - DNA, 16 bp, Homo sapiens
ttttgtaaggttctct

SEQ ID NO: 16904 - DNA, 18 bp, Homo sapiens
ttttgtccgacatcttga

SEQ ID NO: 16905 - DNA, 19 bp, Homo sapiens
ttttgtgtgttagagaacg

SEQ ID NO: 16906 - DNA, 18 bp, Homo sapiens
ttttgtttgttttcctgc

SEQ ID NO: 16907 - DNA, 19 bp, Homo sapiens
tttttccctcttttgctca

SEQ ID NO: 16908 - DNA, 18 bp, Homo sapiens
tttttccgcgggcgcttg

SEQ ID NO: 16909 - DNA, 16 bp, Homo sapiens
tttttctccctctgaa

SEQ ID NO: 16910 - DNA, 21 bp, Homo sapiens
tttttgctgcccggacgcgga

SEQ ID NO: 16911 - DNA, 17 bp, Homo sapiens
tttttgtccgacatctt

SEQ ID NO: 16912 - DNA, 18 bp, Homo sapiens
tttttgtccgacatcttg

SEQ ID NO: 16913 - DNA, 16 bp, Homo sapiens
tttttttcctaatttt

SEQ ID NO: 16914 - DNA, 17 bp, Mus musculus
atggggttgagcgacgg

SEQ ID NO: 16915 - DNA, 19 bp, Mus musculus
agaggacgttgcgtgctcg

SEQ ID NO: 16916 - DNA, 18 bp, Mus musculus
ctgcactctaccggcgct

SEQ ID NO: 16917 - DNA, 19 bp, Mus musculus
aggggttcccggaagatgg

SEQ ID NO: 16918 - DNA, 18 bp, Mus musculus
cccgcagggctaggagaa

SEQ ID NO: 16919 - DNA, 19 bp, Mus musculus
agttccaccagtccgcgag

SEQ ID NO: 16920 - DNA, 18 bp, Mus musculus
ctgttcgcgaggtgaggt

SEQ ID NO: 16921 - DNA, 19 bp, Mus musculus
ctgggagccttcccggcgc

SEQ ID NO: 16922 - DNA, 18 bp, Mus musculus
ccgctggaacctgagccc

SEQ ID NO: 16923 - DNA, 19 bp, Mus musculus
aaagaaggagccgctcgcc

SEQ ID NO: 16924 - DNA, 18 bp, Mus musculus
agcggagagcttggtctg

SEQ ID NO: 16925 - DNA, 18 bp, Mus musculus
ctggggcttgggatgagc

SEQ ID NO: 16926 - DNA, 18 bp, Mus musculus
cagatggaggaggtaccg

SEQ ID NO: 16927 - DNA, 19 bp, Mus musculus
agtgagcgtggggccagcc

SEQ ID NO: 16928 - DNA, 18 bp, Mus musculus
ctgttgcgaagtggtctg

SEQ ID NO: 16929 - DNA, 18 bp, Mus musculus
ctcggtgtaaacaagtcg

SEQ ID NO: 16930 - DNA, 19 bp, Mus musculus
accgcgctgcactgagccg

SEQ ID NO: 16931 - DNA, 19 bp, Mus musculus
cctgatgggggtgatccag

SEQ ID NO: 16932 - DNA, 19 bp, Mus musculus
ctcgggaagatggcgccct

SEQ ID NO: 16933 - DNA, 19 bp, Mus musculus
cagcagagccatggagccc

SEQ ID NO: 16934 - DNA, 19 bp, Mus musculus
agtcagtgtcgcttagcgg

SEQ ID NO: 16935 - DNA, 18 bp, Mus musculus
agagctgagtcccgagtc

SEQ ID NO: 16936 - DNA, 18 bp, Mus musculus
cgtcgcccgcgccgctac

SEQ ID NO: 16937 - DNA, 17 bp, Mus musculus
agactcgggttggggcg

SEQ ID NO: 16938 - DNA, 18 bp, Mus musculus
ctcgtcggtgctgacccg

SEQ ID NO: 16939 - DNA, 18 bp, Mus musculus
cactcgggactagagagc

SEQ ID NO: 16940 - DNA, 18 bp, Mus musculus
cagcctgcgggagggaca

SEQ ID NO: 16941 - DNA, 18 bp, Mus musculus
cggcggccagggcagcga

SEQ ID NO: 16942 - DNA, 19 bp, Mus musculus
atgcaggacgctgagaacg

SEQ ID NO: 16943 - DNA, 19 bp, Mus musculus
aagggctgggtgggcggag

SEQ ID NO: 16944 - DNA, 19 bp, Mus musculus
accgacggctggcagagag

SEQ ID NO: 16945 - DNA, 18 bp, Mus musculus
agtgtggcagggtcatga

SEQ ID NO: 16946 - DNA, 18 bp, Mus musculus
cgagcaaagcgcgcgtga

SEQ ID NO: 16947 - DNA, 19 bp, Mus musculus
ctcggaggagggcaccggg

SEQ ID NO: 16948 - DNA, 19 bp, Mus musculus
agtcagcgtgctaccaccc

SEQ ID NO: 16949 - DNA, 18 bp, Mus musculus
ccggagctccacgccgtg

SEQ ID NO: 16950 - DNA, 19 bp, Mus musculus
caagatggaggctcgctgc

SEQ ID NO: 16951 - DNA, 19 bp, Mus musculus
cttctctcacccaatcgag

SEQ ID NO: 16952 - DNA, 17 bp, Mus musculus
atcgagagcttgtggag

SEQ ID NO: 16953 - DNA, 19 bp, Mus musculus
ctgtcggccgcgcgctccg

SEQ ID NO: 16954 - DNA, 18 bp, Mus musculus
cacggagaaacctgctgc

SEQ ID NO: 16955 - DNA, 19 bp, Mus musculus
cagcctgcgggagggacac

SEQ ID NO: 16956 - DNA, 19 bp, Mus musculus
ctattaaagctgcggtcag

SEQ ID NO: 16957 - DNA, 19 bp, Mus musculus
cccggatcctgcaggcgag

SEQ ID NO: 16958 - DNA, 18 bp, Mus musculus
acgcgagtccgggaccag

SEQ ID NO: 16959 - DNA, 18 bp, Mus musculus
cgggttggcgcaaacggc

SEQ ID NO: 16960 - DNA, 18 bp, Mus musculus
aatggacggaggccacgg

SEQ ID NO: 16961 - DNA, 19 bp, Mus musculus
ccgtcccaggtgtcggttg

SEQ ID NO: 16962 - DNA, 18 bp, Mus musculus
ctcgtctgagccagggga

SEQ ID NO: 16963 - DNA, 19 bp, Mus musculus
agcttcggcggaggcggcg

SEQ ID NO: 16964 - DNA, 19 bp, Mus musculus
gctgcaagtctgtgtccga

SEQ ID NO: 16965 - DNA, 18 bp, Mus musculus
gccactcggagagacgtg

SEQ ID NO: 16966 - DNA, 19 bp, Mus musculus
tggctgccgtagaggccga

SEQ ID NO: 16967 - DNA, 18 bp, Mus musculus
gcgatggcgacggcagtg

SEQ ID NO: 16968 - DNA, 19 bp, Mus musculus
ggggcggaggcagcgaccg

SEQ ID NO: 16969 - DNA, 18 bp, Mus musculus
gcggggcgagaggacgac

SEQ ID NO: 16970 - DNA, 17 bp, Mus musculus
tgtgtgtgagacggacc

SEQ ID NO: 16971 - DNA, 19 bp, Mus musculus
tggtgaacagccttgccgt

SEQ ID NO: 16972 - DNA, 19 bp, Mus musculus
ggtgtgtgtggcgcgctgt

SEQ ID NO: 16973 - DNA, 19 bp, Mus musculus
cttgtaagaatttaactat

SEQ ID NO: 16974 - DNA, 19 bp, Mus musculus
gccgagcgggttggtgccg

SEQ ID NO: 16975 - DNA, 18 bp, Mus musculus
tggtggcgggtggaggat

SEQ ID NO: 16976 - DNA, 18 bp, Mus musculus
ggagggactcgccgcggc

SEQ ID NO: 16977 - DNA, 18 bp, Mus musculus
gcggcacggacagaatgc

SEQ ID NO: 16978 - DNA, 18 bp, Mus musculus
tgttgggcagtagtctca

SEQ ID NO: 16979 - DNA, 18 bp, Mus musculus
tgagacttggcggaggag

SEQ ID NO: 16980 - DNA, 17 bp, Mus musculus
gaggacgcggctgccga

SEQ ID NO: 16981 - DNA, 18 bp, Mus musculus
gtcggcgaggcgggcggc

SEQ ID NO: 16982 - DNA, 17 bp, Mus musculus
tcttgagacggagcacc

SEQ ID NO: 16983 - DNA, 19 bp, Mus musculus
ggatcaccggaaggagcgc

SEQ ID NO: 16984 - DNA, 18 bp, Mus musculus
gcgcgggaggcgaaggct

SEQ ID NO: 16985 - DNA, 19 bp, Mus musculus
gccaactgagaggtctgtg

SEQ ID NO: 16986 - DNA, 19 bp, Mus musculus
tcgcgctgccctgagccct

SEQ ID NO: 16987 - DNA, 18 bp, Mus musculus
gcaggcagacgaggggct

SEQ ID NO: 16988 - DNA, 18 bp, Mus musculus
tgagagggacgtttagtt

SEQ ID NO: 16989 - DNA, 19 bp, Mus musculus
gcttgggtaggatggctgc

SEQ ID NO: 16990 - DNA, 17 bp, Mus musculus
ggatggaggcgggcggc

SEQ ID NO: 16991 - DNA, 19 bp, Mus musculus
tcaggggcagcttctcgga

SEQ ID NO: 16992 - DNA, 19 bp, Mus musculus
gctgagtgggttttcggat

SEQ ID NO: 16993 - DNA, 19 bp, Mus musculus
gacgcggagagagtgcggg

SEQ ID NO: 16994 - DNA, 18 bp, Mus musculus
gagctgcggacggtttgc

SEQ ID NO: 16995 - DNA, 18 bp, Mus musculus
gcggggaatcgtgaacgg

SEQ ID NO: 16996 - DNA, 19 bp, Mus musculus
gtctccgggaggcggcaac

SEQ ID NO: 16997 - DNA, 18 bp, Mus musculus
tctggtcgaggctggaac

SEQ ID NO: 16998 - DNA, 19 bp, Mus musculus
gcgcgctcgggtaacctgt

SEQ ID NO: 16999 - DNA, 17 bp, Mus musculus
ggttcgggtcggggggc

SEQ ID NO: 17000 - DNA, 18 bp, Mus musculus
gctgggccaactgtggtg

SEQ ID NO: 17001 - DNA, 19 bp, Mus musculus
ttagctccgattctgcgct

SEQ ID NO: 17002 - DNA, 18 bp, Mus musculus
gcgtgtagggagggcggg

SEQ ID NO: 17003 - DNA, 18 bp, Mus musculus
tggtgggggcggcgggca

SEQ ID NO: 17004 - DNA, 18 bp, Mus musculus
gcttagccctctcactgt

SEQ ID NO: 17005 - DNA, 18 bp, Mus musculus
ggcatgatgaaggcggag

SEQ ID NO: 17006 - DNA, 19 bp, Mus musculus
tcgctcccacggcctcggt

SEQ ID NO: 17007 - DNA, 18 bp, Mus musculus
ggggcggctggtggacgt

SEQ ID NO: 17008 - DNA, 18 bp, Mus musculus
gagtggagccggcggcgg

SEQ ID NO: 17009 - DNA, 18 bp, Mus musculus
tcctgaaagcttttggca

SEQ ID NO: 17010 - DNA, 18 bp, Mus musculus
gagactgggcgaagcgag

SEQ ID NO: 17011 - DNA, 18 bp, Mus musculus
gtcaagatgcgcccgaaa

SEQ ID NO: 17012 - DNA, 17 bp, Mus musculus
tgagatcgcgggggcag

SEQ ID NO: 17013 - DNA, 18 bp, Mus musculus
gccgccatcttgtgggag

SEQ ID NO: 17014 - DNA, 17 bp, Gallus gallus
aggtgtctgtgggccgg

SEQ ID NO: 17015 - DNA, 18 bp, Gallus gallus
ccgtgtccttaagtctct

SEQ ID NO: 17016 - DNA, 18 bp, Gallus gallus
agctcacttccggttccc

SEQ ID NO: 17017 - DNA, 18 bp, Gallus gallus
ggggtctgggctcgacgg

SEQ ID NO: 17018 - DNA, 17 bp, Gallus gallus
taaggaggaggcggacg

SEQ ID NO: 17019 - DNA, 18 bp, Gallus gallus
gttgaggacagcgctggt

SEQ ID NO: 17020 - DNA, 18 bp, Gallus gallus
gtcggaggcggtggctgc

SEQ ID NO: 17021 - DNA, 19 bp, Gallus gallus
cagcgctggtcatcggaac

SEQ ID NO: 17022 - DNA, 17 bp, Gallus gallus
gctctcacttgtcctcg

SEQ ID NO: 17023 - DNA, 19 bp, Gallus gallus
gtagttgcgttcggagttg

SEQ ID NO: 17024 - DNA, 17 bp, Gallus gallus
gagagcgggaggtgacg

SEQ ID NO: 17025 - DNA, 19 bp, Gallus gallus
gccggaagagggctgtggt

SEQ ID NO: 17026 - DNA, 17 bp, Gallus gallus
tttgtatagcgcgttcg

SEQ ID NO: 17027 - DNA, 17 bp, Gallus gallus
gtagggaacggacggca

SEQ ID NO: 17028 - DNA, 19 bp, Gallus gallus
tggcggcgaacgcgaactc

SEQ ID NO: 17029 - DNA, 17 bp, Gallus gallus
cggctagccactccgcg

SEQ ID NO: 17030 - DNA, 19 bp, Gallus gallus
acacagcctgatccacttc

SEQ ID NO: 17031 - DNA, 18 bp, Gallus gallus
aacaagaagaggactcta

SEQ ID NO: 17032 - DNA, 18 bp, Gallus gallus
aggaggaggcggacgggc

SEQ ID NO: 17033 - DNA, 18 bp, Gallus gallus
tccctcctacccgcccgg

SEQ ID NO: 17034 - DNA, 18 bp, Gallus gallus
caggacgcggccgagctc

SEQ ID NO: 17035 - DNA, 18 bp, Gallus gallus
atggacgagctagaccag

SEQ ID NO: 17036 - DNA, 18 bp, Gallus gallus
agcggcttctggaaggtc

SEQ ID NO: 17037 - DNA, 19 bp, Gallus gallus
agcggaggggcggcgggcg

SEQ ID NO: 17038 - DNA, 18 bp, Gallus gallus
gttggggggtgcgggccc

SEQ ID NO: 17039 - DNA, 18 bp, Gallus gallus
agggactcgggagcagcg

SEQ ID NO: 17040 - DNA, 18 bp, Gallus gallus
cgctcggtccctcacgct

SEQ ID NO: 17041 - DNA, 17 bp, Gallus gallus
gctcactcacccgctcg

SEQ ID NO: 17042 - DNA, 17 bp, Gallus gallus
cgaacagggacgaggcg

SEQ ID NO: 17043 - DNA, 18 bp, Gallus gallus
cgccaacgccaacccgaa

SEQ ID NO: 17044 - DNA, 18 bp, Gallus gallus
cgaacgtccaaccagcaa

SEQ ID NO: 17045 - DNA, 17 bp, Gallus gallus
acaagatggcggacctg

SEQ ID NO: 17046 - DNA, 18 bp, Gallus gallus
ctgggtgggtggccgggg

SEQ ID NO: 17047 - DNA, 18 bp, Gallus gallus
aggagcggtagaagctgc

SEQ ID NO: 17048 - DNA, 19 bp, Gallus gallus
cccgtgacgggatccgcca

SEQ ID NO: 17049 - DNA, 19 bp, Gallus gallus
agcgagctggtagctgctg

SEQ ID NO: 17050 - DNA, 18 bp, Gallus gallus
cacccctaccttctcttc

SEQ ID NO: 17051 - DNA, 18 bp, Gallus gallus
ctgcacttacatccaaac

SEQ ID NO: 17052 - DNA, 18 bp, Gallus gallus
ttcgaggagctgcgggtg

SEQ ID NO: 17053 - DNA, 18 bp, Gallus gallus
acagaactctcttgaggc

SEQ ID NO: 17054 - DNA, 18 bp, Gallus gallus
aggacaggtgagtgtgac

SEQ ID NO: 17055 - DNA, 17 bp, Gallus gallus
tgccgctcgttcaccac

SEQ ID NO: 17056 - DNA, 17 bp, Gallus gallus
cggagagcgggaggtga

SEQ ID NO: 17057 - DNA, 19 bp, Gallus gallus
ctccacgcacagccggacg

SEQ ID NO: 17058 - DNA, 19 bp, Gallus gallus
ccattggagcggctgtgtc

SEQ ID NO: 17059 - DNA, 19 bp, Gallus gallus
aggacgatggaggcgcgca

SEQ ID NO: 17060 - DNA, 19 bp, Gallus gallus
tgccagactgagtgcctct

SEQ ID NO: 17061 - DNA, 18 bp, Gallus gallus
agcacgtccgccatcttc

SEQ ID NO: 17062 - DNA, 18 bp, Gallus gallus
cgctccgcacccacccgc

SEQ ID NO: 17063 - DNA, 19 bp, Gallus gallus
gctgctcctccaggtccgc

SEQ ID NO: 17064 - DNA, 19 bp, Gallus gallus
gcagctcctcctcaggcgg

SEQ ID NO: 17065 - DNA, 19 bp, Gallus gallus
ttgcgatacgtcggcatgg

SEQ ID NO: 17066 - DNA, 17 bp, Gallus gallus
tcgcgcctctccgcccg

SEQ ID NO: 17067 - DNA, 18 bp, Gallus gallus
tccgccgtccgcgctcat

SEQ ID NO: 17068 - DNA, 19 bp, Gallus gallus
ctcactgcgcgctggggcc

SEQ ID NO: 17069 - DNA, 18 bp, Gallus gallus
gacaagatggcggacctg

SEQ ID NO: 17070 - DNA, 19 bp, Gallus gallus
cccgtccgtgccgtacagg

SEQ ID NO: 17071 - DNA, 18 bp, Gallus gallus
ctcactcctccatcgccg

SEQ ID NO: 17072 - DNA, 18 bp, Gallus gallus
gagggagggcgggtggag

SEQ ID NO: 17073 - DNA, 18 bp, Gallus gallus
ccgcaggaggtgaacgtg

SEQ ID NO: 17074 - DNA, 19 bp, Gallus gallus
gccggccgtggaggagctg

SEQ ID NO: 17075 - DNA, 19 bp, Gallus gallus
gccgtgcggtggtgttggt

SEQ ID NO: 17076 - DNA, 18 bp, Gallus gallus
gcgcccggagctgaggct

SEQ ID NO: 17077 - DNA, 19 bp, Gallus gallus
ccgactttgaggaccgggt

SEQ ID NO: 17078 - DNA, 19 bp, Gallus gallus
cggagaggaaacagctgag

SEQ ID NO: 17079 - DNA, 19 bp, Gallus gallus
gatggatgtggagaagatc

SEQ ID NO: 17080 - DNA, 19 bp, Gallus gallus
gccgcggtcatgtctggca

SEQ ID NO: 17081 - DNA, 17 bp, Gallus gallus
gctggtcatcggaacat

SEQ ID NO: 17082 - DNA, 17 bp, Gallus gallus
cactccgacaacatggc

SEQ ID NO: 17083 - DNA, 18 bp, Gallus gallus
ccatccgccatgatcctc

SEQ ID NO: 17084 - DNA, 18 bp, Gallus gallus
cggacgcgtttggggatg

SEQ ID NO: 17085 - DNA, 18 bp, Gallus gallus
aagcggcccagtcgtctc

SEQ ID NO: 17086 - DNA, 18 bp, Gallus gallus
aggaaacagctgagagca

SEQ ID NO: 17087 - DNA, 18 bp, Gallus gallus
acagcgctggtcatcgga

SEQ ID NO: 17088 - DNA, 17 bp, Gallus gallus
gcctcccaacccgtctc

SEQ ID NO: 17089 - DNA, 18 bp, Gallus gallus
agcccctctgtctcactg

SEQ ID NO: 17090 - DNA, 19 bp, Gallus gallus
aggcaccatggacgagcta

SEQ ID NO: 17091 - DNA, 18 bp, Gallus gallus
gagggagggcgggtggag

SEQ ID NO: 17092 - DNA, 18 bp, Gallus gallus
gaggatggcggagccgca

SEQ ID NO: 17093 - DNA, 18 bp, Gallus gallus
gcaggtagtagaacatag

SEQ ID NO: 17094 - DNA, 18 bp, Gallus gallus
gccgtgcggtggtgttgg

SEQ ID NO: 17095 - DNA, 19 bp, Gallus gallus
cacggatcgctttcctgac

SEQ ID NO: 17096 - DNA, 18 bp, Gallus gallus
cggcggtagggaacggac

SEQ ID NO: 17097 - DNA, 18 bp, Gallus gallus
caggcatgtcgaactctc

SEQ ID NO: 17098 - DNA, 18 bp, Gallus gallus
cggactgggatacggccg

SEQ ID NO: 17099 - DNA, 19 bp, Gallus gallus
gcgctggtcatcggaacat

SEQ ID NO: 17100 - DNA, 18 bp, Gallus gallus
gccgcgcgttgggccgcg

SEQ ID NO: 17101 - DNA, 18 bp, Gallus gallus
gagctccgctctccgctc

SEQ ID NO: 17102 - DNA, 18 bp, Gallus gallus
gcagatgcggacgctctt

SEQ ID NO: 17103 - DNA, 18 bp, Gallus gallus
gtgcccgggaagatggcg

SEQ ID NO: 17104 - DNA, 18 bp, Gallus gallus
acgtctgttcctttcctg

SEQ ID NO: 17105 - DNA, 18 bp, Gallus gallus
aagaccaaccgccctcag

SEQ ID NO: 17106 - DNA, 18 bp, Gallus gallus
gcctgctccatgccgccg

SEQ ID NO: 17107 - DNA, 17 bp, Gallus gallus
ctccggcagcagcgggc

SEQ ID NO: 17108 - DNA, 19 bp, Gallus gallus
gagctgaggtgcgggcggt

SEQ ID NO: 17109 - DNA, 18 bp, Gallus gallus
cgctcaccatcctgctcg

SEQ ID NO: 17110 - DNA, 18 bp, Gallus gallus
aaagtcgggagcggagag

SEQ ID NO: 17111 - DNA, 17 bp, Gallus gallus
gccgcggactatgtgcg

SEQ ID NO: 17112 - DNA, 18 bp, Gallus gallus
gactgctccgccgtccgc

SEQ ID NO: 17113 - DNA, 15 bp, Gallus gallus
cactccacactgttc

SEQ ID NO: 17114 - DNA, 18 bp, Drosophila melanogaster
agaaggttggtgtaactg

SEQ ID NO: 17115 - DNA, 18 bp, Drosophila melanogaster
agccgcgagatgcccgtc

SEQ ID NO: 17116 - DNA, 18 bp, Drosophila melanogaster
agccaaaaagcaagggca

SEQ ID NO: 17117 - DNA, 18 bp, Drosophila melanogaster
cggagaggttgcatttta

SEQ ID NO: 17118 - DNA, 18 bp, Drosophila melanogaster
ccgcaatgacaacgccca

SEQ ID NO: 17119 - DNA, 18 bp, Drosophila melanogaster
caaaaccaacccgaattg

SEQ ID NO: 17120 - DNA, 19 bp, Drosophila melanogaster
agaaaacgagctctcgccg

SEQ ID NO: 17121 - DNA, 18 bp, Drosophila melanogaster
ctgctctcgtttaattgt

SEQ ID NO: 17122 - DNA, 17 bp, Drosophila melanogaster
attttatatttcagcga

SEQ ID NO: 17123 - DNA, 19 bp, Drosophila melanogaster
agaggagaggcagtcagat

SEQ ID NO: 17124 - DNA, 17 bp, Drosophila melanogaster
aacaagggcaagacagt

SEQ ID NO: 17125 - DNA, 19 bp, Drosophila melanogaster
cgtggtggatgagatgacc

SEQ ID NO: 17126 - DNA, 17 bp, Drosophila melanogaster
aagtgcgtgcagttggc

SEQ ID NO: 17127 - DNA, 17 bp, Drosophila melanogaster
cgttgcttgcgaaatgg

SEQ ID NO: 17128 - DNA, 17 bp, Drosophila melanogaster
ccagttcgattcccaac

SEQ ID NO: 17129 - DNA, 19 bp, Drosophila melanogaster
cgcggttgtgccaaaatga

SEQ ID NO: 17130 - DNA, 18 bp, Drosophila melanogaster
aaagccaccaccagagcg

SEQ ID NO: 17131 - DNA, 19 bp, Drosophila melanogaster
cgaacgtgcgactctatcc

SEQ ID NO: 17132 - DNA, 17 bp, Drosophila melanogaster
ccgaggcttggtgatgc

SEQ ID NO: 17133 - DNA, 18 bp, Drosophila melanogaster
aaattcgagaaagtgctg

SEQ ID NO: 17134 - DNA, 17 bp, Drosophila melanogaster
aacatctggcaggagta

SEQ ID NO: 17135 - DNA, 17 bp, Drosophila melanogaster
cgctggcgtggtgaggt

SEQ ID NO: 17136 - DNA, 17 bp, Drosophila melanogaster
accggcaaacaaaacag

SEQ ID NO: 17137 - DNA, 18 bp, Drosophila melanogaster
ctggcctactaagtccca

SEQ ID NO: 17138 - DNA, 19 bp, Drosophila melanogaster
attcgttggacgcggatgc

SEQ ID NO: 17139 - DNA, 17 bp, Drosophila melanogaster
ctggttgccctggctct

SEQ ID NO: 17140 - DNA, 17 bp, Drosophila melanogaster
ctgggccaaacaatacc

SEQ ID NO: 17141 - DNA, 18 bp, Drosophila melanogaster
agccatatcgagtgtgct

SEQ ID NO: 17142 - DNA, 17 bp, Drosophila melanogaster
aatttatttttgggctt

SEQ ID NO: 17143 - DNA, 18 bp, Drosophila melanogaster
atcgcagcacaaacgtaa

SEQ ID NO: 17144 - DNA, 18 bp, Drosophila melanogaster
acgggtggcctgcaagcg

SEQ ID NO: 17145 - DNA, 19 bp, Drosophila melanogaster
agtttgattgattacccca

SEQ ID NO: 17146 - DNA, 18 bp, Drosophila melanogaster
cgtgagttaggttgcgaa

SEQ ID NO: 17147 - DNA, 18 bp, Drosophila melanogaster
agtacacaagaaaacaga

SEQ ID NO: 17148 - DNA, 19 bp, Drosophila melanogaster
atttttggcaacttgcaca

SEQ ID NO: 17149 - DNA, 18 bp, Drosophila melanogaster
accagccgcagactgatc

SEQ ID NO: 17150 - DNA, 18 bp, Drosophila melanogaster
aggaaacggacgtgagtg

SEQ ID NO: 17151 - DNA, 19 bp, Drosophila melanogaster
ccaaaaggaggtggctaag

SEQ ID NO: 17152 - DNA, 19 bp, Drosophila melanogaster
agtttccgaggcttggtga

SEQ ID NO: 17153 - DNA, 18 bp, Drosophila melanogaster
aggcttggtgatgcgagc

SEQ ID NO: 17154 - DNA, 18 bp, Drosophila melanogaster
aactaatcgaaatgggcg

SEQ ID NO: 17155 - DNA, 19 bp, Drosophila melanogaster
aagtgcgattgccgaagaa

SEQ ID NO: 17156 - DNA, 18 bp, Drosophila melanogaster
cgcgggcggacgacgaga

SEQ ID NO: 17157 - DNA, 17 bp, Drosophila melanogaster
cgaaacttacgcccgtg

SEQ ID NO: 17158 - DNA, 17 bp, Drosophila melanogaster
cggtgattgcgttagct

SEQ ID NO: 17159 - DNA, 19 bp, Drosophila melanogaster
aaatggaaagatcaagtga

SEQ ID NO: 17160 - DNA, 17 bp, Drosophila melanogaster
acagacgagataagatg

SEQ ID NO: 17161 - DNA, 19 bp, Drosophila melanogaster
aggaagcccacgcggaagt

SEQ ID NO: 17162 - DNA, 17 bp, Drosophila melanogaster
attcgtttcgcgacttt

SEQ ID NO: 17163 - DNA, 18 bp, Drosophila melanogaster
agttgtcaacaggaatcg

SEQ ID NO: 17164 - DNA, 17 bp, Drosophila melanogaster
gcgcggacaaacggttg

SEQ ID NO: 17165 - DNA, 18 bp, Drosophila melanogaster
gctgaacacaaccaaccg

SEQ ID NO: 17166 - DNA, 17 bp, Drosophila melanogaster
gctcggaacggacgtgt

SEQ ID NO: 17167 - DNA, 17 bp, Drosophila melanogaster
tggcgaaaccaacacgg

SEQ ID NO: 17168 - DNA, 18 bp, Drosophila melanogaster
tccgaggcttggtgatgc

SEQ ID NO: 17169 - DNA, 19 bp, Drosophila melanogaster
gtgccaaataattttcaga

SEQ ID NO: 17170 - DNA, 17 bp, Drosophila melanogaster
gccgtgaagatcgaact

SEQ ID NO: 17171 - DNA, 18 bp, Drosophila melanogaster
ttcgtgccgtgaagatcg

SEQ ID NO: 17172 - DNA, 18 bp, Drosophila melanogaster
gtgcaaatgaacattagg

SEQ ID NO: 17173 - DNA, 17 bp, Drosophila melanogaster
gcgtgcttgttctcgtc

SEQ ID NO: 17174 - DNA, 18 bp, Drosophila melanogaster
gaagttcctgatcatcct

SEQ ID NO: 17175 - DNA, 18 bp, Drosophila melanogaster
tgtgcgactaaacaggag

SEQ ID NO: 17176 - DNA, 19 bp, Drosophila melanogaster
gagacaccaaaccgaaaga

SEQ ID NO: 17177 - DNA, 18 bp, Drosophila melanogaster
ttatggtgacaccaaaat

SEQ ID NO: 17178 - DNA, 18 bp, Drosophila melanogaster
tacttgcatctcttcaaa

SEQ ID NO: 17179 - DNA, 17 bp, Drosophila melanogaster
tggagctgcaaagagaa

SEQ ID NO: 17180 - DNA, 18 bp, Drosophila melanogaster
gaacaaaggtcatcttcc

SEQ ID NO: 17181 - DNA, 18 bp, Drosophila melanogaster
tctgccgtgtagccccaa

SEQ ID NO: 17182 - DNA, 17 bp, Drosophila melanogaster
tccagaaaaaggaaagc

SEQ ID NO: 17183 - DNA, 19 bp, Drosophila melanogaster
gaaggagcaaggagccagc

SEQ ID NO: 17184 - DNA, 17 bp, Drosophila melanogaster
gaatttagcaatgaata

SEQ ID NO: 17185 - DNA, 18 bp, Drosophila melanogaster
tggatgactccagtgcca

SEQ ID NO: 17186 - DNA, 18 bp, Drosophila melanogaster
gcaaacaaatcagcagcg

SEQ ID NO: 17187 - DNA, 19 bp, Drosophila melanogaster
ttctgcaacatgaaggtgt

SEQ ID NO: 17188 - DNA, 18 bp, Drosophila melanogaster
gtgaacaaaaaatacgaa

SEQ ID NO: 17189 - DNA, 18 bp, Drosophila melanogaster
ttgagcgaaccaaagccg

SEQ ID NO: 17190 - DNA, 18 bp, Drosophila melanogaster
ttctgctggttttcatta

SEQ ID NO: 17191 - DNA, 19 bp, Drosophila melanogaster
gctctggccgctcctgctc

SEQ ID NO: 17192 - DNA, 18 bp, Drosophila melanogaster
gagttcccttaactgaac

SEQ ID NO: 17193 - DNA, 19 bp, Drosophila melanogaster
gtcacggtgagcggatcaa

SEQ ID NO: 17194 - DNA, 18 bp, Drosophila melanogaster
gcaatgaaggcagcaaac

SEQ ID NO: 17195 - DNA, 17 bp, Drosophila melanogaster
ggtgtatttgaatggtc

SEQ ID NO: 17196 - DNA, 19 bp, Drosophila melanogaster
tgtccgaatggcaaagtgc

SEQ ID NO: 17197 - DNA, 17 bp, Drosophila melanogaster
ggctatatagttgcgcc

SEQ ID NO: 17198 - DNA, 17 bp, Drosophila melanogaster
gtgcaggataagttgcg

SEQ ID NO: 17199 - DNA, 19 bp, Drosophila melanogaster
gatcaacatgaagcgaaga

SEQ ID NO: 17200 - DNA, 18 bp, Drosophila melanogaster
gcttaaaccgcatgccta

SEQ ID NO: 17201 - DNA, 18 bp, Drosophila melanogaster
tactggcctactaagtcc

SEQ ID NO: 17202 - DNA, 19 bp, Drosophila melanogaster
ggtgaacacatagcagcca

SEQ ID NO: 17203 - DNA, 19 bp, Drosophila melanogaster
ggcattgctggctactctc

SEQ ID NO: 17204 - DNA, 19 bp, Drosophila melanogaster
gacagggttgtgaataaag

SEQ ID NO: 17205 - DNA, 17 bp, Drosophila melanogaster
gactttaggtgttggtc

SEQ ID NO: 17206 - DNA, 19 bp, Drosophila melanogaster
tggacatgcccagccagct

SEQ ID NO: 17207 - DNA, 18 bp, Drosophila melanogaster
tcgctcggaacggacgtg

SEQ ID NO: 17208 - DNA, 18 bp, Drosophila melanogaster
tggtcgggtgtccccaac

SEQ ID NO: 17209 - DNA, 19 bp, Drosophila melanogaster
gaacgtgattttcgttgcc

SEQ ID NO: 17210 - DNA, 18 bp, Drosophila melanogaster
gatactcctcccgacaca

SEQ ID NO: 17211 - DNA, 19 bp, Drosophila melanogaster
gcttcgaacggttgtgtct

SEQ ID NO: 17212 - DNA, 17 bp, Drosophila melanogaster
gtgaacgctgtaacgtt

SEQ ID NO: 17213 - DNA, 19 bp, Drosophila melanogaster
ggtctacgcggcagtcgac
